(19) United States
(12) Patent Application Publication
(10) Pub. No.: US 2014/0322218 A1
(43) Pub. Date: Oct. 30, 2014

(54) Antibody Constructs for CDH19 and CD3

(71) Applicant: AMGEN RESEARCH (MUNICH) GMBH, Munich (DE)

(72) Inventors: Shouhua Xiao, Foster City, CA (US); Zheng Pan, Fremont, CA (US); Dineli Wickramasinghe, San Francisco, CA (US); Shawn Jeffries, Indianapolis, IN (US); Chadwick T. King, North Vancouver (CA); Brian Mingtung Chan, Port Coquitlam (CA); Peter Kufer, Munich (DE); Ralf Lutterbüse, Munich (DE); Tobias Raum, Munich (DE); Patrick Hoffmann, Munich (DE); Doris Rau, Munich (DE); Roman Kischel, Munich (DE); Bryan Lemon, Mountain View, CA (US); Holger Wesche, San Francisco, CA (US)

(73) Assignee: AMGEN RESEARCH (MUNICH) GMBH, Munich (DE)

(21) Appl. No.: 14/165,330

(22) Filed: Jan. 27, 2014

Related U.S. Application Data
(60) Provisional application No. 61/785,147, filed on Mar. 14, 2013.
(60) Provisional application No. 61/756,991, filed on Jan. 25, 2013.

(51) Int. Cl. C07K 16/46; C07K 16/28

(52) U.S. Cl. CPC C07K 16/468; C07K 16/2809; C07K 16/2896
USPC 424/135.1; 530/387.3; 536/23.53; 424/136.1; 435/320.1; 435/69.6; 435/254.2; 435/254.11; 435/328; 435/252.33; 435/254.21; 435/254.23; 435/254.22; 435/254.6; 435/254.4; 435/254.5; 435/254.3; 435/419; 435/417; 435/415; 435/411; 435/414; 435/412

(57) ABSTRACT

The present invention provides to a antibody construct comprising a first human binding domain capable of binding to human CDH19 on the surface of a target cell and a second domain capable of binding to human CD3 on the surface of a T cell. Moreover, the invention relates to a nucleic acid sequence encoding the antibody construct, a vector comprising said nucleic acid sequence and a host cell transformed or transfected with said vector. Furthermore, the invention relates a process for the production of the antibody construct of the invention, a medical use of said antibody construct and a kit comprising said antibody construct.

### RELATED APPLICATIONS

[0001] This application is related to a U.S. provisional application entitled “Antibodies targeting CDH19 for melanoma”, filed on Mar. 15, 2013, the same day as the present application is filed. This related application is incorporated in its entirety by reference.

### FIELD OF THE INVENTION

[0002] The present invention relates to an antibody construct comprising a first human binding domain capable of binding to human CDH19 on the surface of a target cell and a second domain capable of binding to human CD3 on the surface of a T cell. Moreover, the invention provides a nucleic acid sequence encoding the antibody construct, a vector comprising said nucleic acid sequence and a host cell transformed or transfected with said vector. Furthermore, the invention provides a process for the production of the antibody construct of the invention, a medical use of said antibody construct and a kit comprising said antibody construct.

### BACKGROUND OF THE INVENTION

[0003] Melanoma is a skin cancer that is caused by the oncogenic transformation of melanocytes, which are pigment producing skin cells. As of 2009, Melanoma had a prevalence of more than 870,000 cases in the US alone (US National Institutes of Health). Each year, over 75,000 new cases of melanoma are diagnosed in the US, and approximately 25% of patients have advanced disease at the time of diagnosis. Despite the fact that cases of primary melanoma can be cured by surgery if they are detected early enough, melanoma is the leading cause of death from skin disease in the US, responsible for about 10,000 deaths per year in the US. Once the disease has spread and became metastatic, the prognosis is poor, with a 5 year relative survival of 15%.

[0004] There are four basic types of melanomas. Three types are found in the top layers of the skin and the fourth one is invasive and has penetrated deeper into the skin and may have spread to other areas of the body.

[0005] Superficial spreading melanoma is the most common type of melanoma which accounts for about 70% of all cases. It grows along the top layer of the skin for a fairly long time before penetrating more deeply. It first appears as a flat or slightly raised discolored patch that has irregular borders and may be somewhat asymmetrical in form. The color varies, and you may see areas of tan, brown, black, red, blue or white. This type of melanoma can occur in a previously benign mole and is found most often in young people.

[0006] Lentigo maligna is similar to the superficial spreading type, as it also remains close to the skin surface for quite a while, and usually appears as a flat or mildly elevated mottled tan, brown or dark brown discoloration. It is found most often in the elderly. When this cancer becomes invasive, it is referred to as lentigo maligna melanoma.

[0007] Acral lentiginous melanoma also spreads superficially before penetrating more deeply. It is quite different from the others, though, as it usually appears as a black or brown discoloration under the nails or on the soles of the feet or palms of the hands. This type of melanoma is sometimes found on dark-skinned people, and can often advance more quickly than superficial spreading melanoma and lentigo maligna.

[0008] Nodular melanoma is usually invasive at the time it is first diagnosed. The malignancy is recognized when it becomes a bump. It is usually black, but occasionally is blue, gray, white, brown, tan, red or skin tone. This is the most aggressive of the melanomas, and is found in 10 to 15 percent of cases.

[0009] Common treatments for metastatic melanoma include chemotherapy, targeted therapies for eligible patients (e.g. BRAF inhibitor treatment for patients with BRAF mutations) and immunotherapy. Metastatic melanoma is a tumor type where immunotherapy has been demonstrated to not only slow disease progression, but to lead to cures in late stage patients. Interleukin-2 was approved for the use in metastatic melanoma in 1998, and in 2011 an antibody targeting CTLA4, a member of a new generation of immune checkpoint inhibitors, gained approval by the FDA.

[0010] CDH19 is a type II cadherin transmembrane protein of unknown function. The human gene was cloned in 2000 based on its sequence similarity to CDH7 (Kools, P. et al. Genomics. 2000). Expressed Sequence Tags (ESTs) for CDH19 were isolated from melanocyte cDNA libraries, indicating that expression of CDH19 may be limited to cells of neural crest origin (Kools, P. et al. Genomics. 2000). In support of this notion, rat CDH19 was found to be expressed primarily in nerve ganglia and in Schwann cells during rat embryonic development (Takahashi, M. and Osumi, O. Devl Dynamics. 2005.).

[0011] Diagnostic antibodies detecting CDH19 in Western Blot, immunohistochemitstry or flow cytometry are known in the art and commercially available. Those antibodies comprise poly- and monoclonal antibodies generated in animal hosts.

### SUMMARY OF THE INVENTION

[0012] The present invention provides an isolated multispecific antibody construct comprising a first human binding domain capable of binding to human CDH19 on the surface of a target cell and a second domain capable of binding to human CD3 on the surface of a T cell.

[0013] In one embodiment the antibody construct of the invention the first binding domain comprises a VH region comprising CDR-H1, CDR-H2 and CDR-H3 and a VL region comprising CDR-L1, CDR-L2 and CDR-L3 selected from the group consisting of:
[0014] (a) CDR-H1 as depicted in SEQ ID NO: 52, CDR-H2 as depicted in SEQ ID NO: 53, CDR-H3 as depicted in SEQ ID NO: 54, CDR-L1 as depicted in SEQ ID NO: 220, CDR-L2 as depicted in SEQ ID NO: 221 and CDR-L3 as depicted in SEQ ID NO: 222, CDR-H1 as depicted in SEQ ID NO: 82, CDR-H2 as depicted in SEQ ID NO: 83, CDR-H3 as depicted in SEQ ID NO: 84, CDR-L1 as depicted in SEQ ID NO: 250, CDR-L2 as depicted in SEQ ID NO: 251 and CDR-L3 as depicted in SEQ ID NO: 252, CDR-H1 as depicted in SEQ ID NO: 82, CDR-H2 as depicted in SEQ ID NO: 83, CDR-H3 as depicted in SEQ ID NO: 84, CDR-L1 as depicted in SEQ ID NO: 250, CDR-L2 as depicted in SEQ ID NO: 251 and CDR-L3 as depicted in SEQ ID NO: 927, CDR-H1 as depicted in SEQ ID NO: 82, CDR-H2 as depicted in SEQ ID NO: 83, CDR-H3 as depicted in SEQ ID NO: 909, CDR-L1 as depicted in SEQ ID NO: 250, CDR-L2 as depicted in SEQ ID NO: 251 and CDR-L3 as depicted in SEQ ID NO: 927, CDR-H1 as depicted in SEQ ID NO: 52, CDR-H2 as depicted in SEQ ID NO: 53, CDR-H3 as depicted in SEQ ID NO: 54, CDR-L1 as depicted in SEQ ID NO: 220, CDR-L2 as depicted in SEQ ID NO: 221 and CDR-L3 as depicted in SEQ ID NO: 926, CDR-H1 as depicted in SEQ ID NO: 52, CDR-H2 as depicted in SEQ ID NO: 53, CDR-H3 as depicted in SEQ ID NO: 904, CDR-L1 as depicted in SEQ ID NO: 220, CDR-L2 as depicted in SEQ ID NO: 221 and CDR-L3 as depicted in SEQ ID NO: 926, CDR-H1 as depicted in SEQ ID NO: 1126, CDR-H2 as depicted in SEQ ID NO: 1127, CDR-H3 as depicted in SEQ ID NO: 1128, CDR-L1 as depicted in SEQ ID NO: 1129, CDR-L2 as depicted in SEQ ID NO: 1130 and CDR-L3 as depicted in SEQ ID NO: 1131,
   [0015] CDR-H1 as depicted in SEQ ID NO: 1165, CDR-H2 as depicted in SEQ ID NO: 1166, CDR-H3 as depicted in SEQ ID NO: 1167, CDR-L1 as depicted in SEQ ID NO: 1168, CDR-L2 as depicted in SEQ ID NO: 1169 and CDR-L3 as depicted in SEQ ID NO: 1170,
   [0016] CDR-H1 as depicted in SEQ ID NO: 1334, CDR-H2 as depicted in SEQ ID NO: 1335, CDR-H3 as depicted in SEQ ID NO: 1336, CDR-L1 as depicted in SEQ ID NO: 1337, CDR-L2 as depicted in SEQ ID NO: 1338 and CDR-L3 as depicted in SEQ ID NO: 1339,
   [0017] CDR-H1 as depicted in SEQ ID NO: 1347, CDR-H2 as depicted in SEQ ID NO: 1348, CDR-H3 as depicted in SEQ ID NO: 1349, CDR-L1 as depicted in SEQ ID NO: 1350, CDR-L2 as depicted in SEQ ID NO: 1351 and CDR-L3 as depicted in SEQ ID NO: 1352, and
   [0018] CDR-H1 as depicted in SEQ ID NO: 1360 CDR-H2 as depicted in SEQ ID NO: 1361, CDR-H3 as depicted in SEQ ID NO: 1362, CDR-L1 as depicted in SEQ ID NO: 1363, CDR-L2 as depicted in SEQ ID NO: 1364 and CDR-L3 as depicted in SEQ ID NO: 1365,
   [0019] CDR-H1 as depicted in SEQ ID NO: 1425 CDR-H2 as depicted in SEQ ID NO: 1426, CDR-H3 as depicted in SEQ ID NO: 1427, CDR-L1 as depicted in SEQ ID NO: 1428, CDR-L2 as depicted in SEQ ID NO: 1429 and CDR-L3 as depicted in SEQ ID NO: 1430,
   [0020] CDR-H1 as depicted in SEQ ID NO: 1438 CDR-H2 as depicted in SEQ ID NO: 1439, CDR-H3 as depicted in SEQ ID NO: 1440, CDR-L1 as depicted in SEQ ID NO: 1441, CDR-L2 as depicted in SEQ ID NO: 1442 and CDR-L3 as depicted in SEQ ID NO: 1443;
[0021] (b) CDR-H1 as depicted in SEQ ID NO: 124, CDR-H2 as depicted in SEQ ID NO: 125, CDR-H3 as depicted in SEQ ID NO: 126, CDR-L1 as depicted in SEQ ID NO: 292, CDR-L2 as depicted in SEQ ID NO: 293 and CDR-L3 as depicted in SEQ ID NO: 294, CDR-H1 as depicted in SEQ ID NO: 130, CDR-H2 as depicted in SEQ ID NO: 131, CDR-H3 as depicted in SEQ ID NO: 132, CDR-L1 as depicted in SEQ ID NO: 298, CDR-L2 as depicted in SEQ ID NO: 299 and CDR-L3 as depicted in SEQ ID NO: 300, CDR-H1 as depicted in SEQ ID NO: 136, CDR-H2 as depicted in SEQ ID NO: 137, CDR-H3 as depicted in SEQ ID NO: 138, CDR-L1 as depicted in SEQ ID NO: 304, CDR-L2 as depicted in SEQ ID NO: 305 and CDR-L3 as depicted in SEQ ID NO: 306, CDR-H1 as depicted in SEQ ID NO: 142, CDR-H2 as depicted in SEQ ID NO: 143, CDR-H3 as depicted in SEQ ID NO: 144, CDR-L1 as depicted in SEQ ID NO: 310, CDR-L2 as depicted in SEQ ID NO: 311 and CDR-L3 as depicted in SEQ ID NO: 312, CDR-H1 as depicted in SEQ ID NO: 148, CDR-H2 as depicted in SEQ ID NO: 149, CDR-H3 as depicted in SEQ ID NO: 150, CDR-L1 as depicted in SEQ ID NO: 316, CDR-L2 as depicted in SEQ ID NO: 317 and CDR-L3 as depicted in SEQ ID NO: 318, CDR-H1 as depicted in SEQ ID NO: 166, CDR-H2 as depicted in SEQ ID NO: 167, CDR-H3 as depicted in SEQ ID NO: 168, CDR-L1 as depicted in SEQ ID NO: 334, CDR-L2 as depicted in SEQ ID NO: 335 and CDR-L3 as depicted in SEQ ID NO: 336, CDR-H1 as depicted in SEQ ID NO: 124, CDR-H2 as depicted in SEQ ID NO: 125, CDR-H3 as depicted in SEQ ID NO: 915, CDR-L1 as depicted in SEQ ID NO: 292, CDR-L2 as depicted in SEQ ID NO: 293 and CDR-L3 as depicted in SEQ ID NO: 294, CDR-H1 as depicted in SEQ ID NO: 124, CDR-H2 as depicted in SEQ ID NO: 125, CDR-H3 as depicted in SEQ ID NO: 915, CDR-L1 as depicted in SEQ ID NO: 292, CDR-L2 as depicted in SEQ ID NO: 293 and CDR-L3 as depicted in SEQ ID NO: 928, CDR-H1 as depicted in SEQ ID NO: 124, CDR-H2 as depicted in SEQ ID NO: 125, CDR-H3 as depicted in SEQ ID NO: 915, CDR-L1 as depicted in SEQ ID NO: 292, CDR-L2 as depicted in SEQ ID NO: 293 and CDR-L3 as depicted in SEQ ID NO: 929, CDR-H1 as depicted in SEQ ID NO: 166, CDR-H2 as depicted in SEQ ID NO: 167, CDR-H3 as depicted in SEQ ID NO: 168, CDR-L1 as depicted in SEQ ID NO: 334, CDR-L2 as depicted in SEQ ID NO: 335 and CDR-L3 as depicted in SEQ ID NO: 336, CDR-H1 as depicted in SEQ ID NO: 166, CDR-H2 as depicted in SEQ ID NO: 167, CDR-H3 as depicted in SEQ ID NO: 168, CDR-L1 as depicted in SEQ ID NO: 334, CDR-L2 as depicted in SEQ ID NO: 335 and CDR-L3 as depicted in SEQ ID NO: 942, CDR-H1 as depicted in SEQ ID NO: 166, CDR-H2 as depicted in SEQ ID NO: 167, CDR-H3 as depicted in SEQ ID NO: 168, CDR-L1 as depicted in SEQ ID NO: 334, CDR-L2 as depicted in SEQ ID NO: 335 and CDR-L3 as depicted in SEQ ID NO: 943, CDR-H1 as depicted in SEQ ID NO: 148, CDR-H2 as depicted in SEQ ID NO: 149, CDR-H3 as depicted in SEQ ID NO: 150, CDR-L1 as depicted in SEQ ID NO: 316, CDR-L2 as depicted in SEQ ID NO: 317 and CDR-L3 as depicted in SEQ ID NO: 318, CDR-H1 as depicted in SEQ ID NO: 148, CDR-H2 as depicted in SEQ ID NO: 149, CDR-H3 as depicted in SEQ ID NO: 150, CDR-L1 as depicted in SEQ ID NO: 316, CDR-L2 as depicted in SEQ ID NO: 317 and CDR-L3 as depicted in SEQ ID NO: 937, CDR-H1 as depicted in SEQ ID NO: 148, CDR-H2 as depicted in SEQ ID NO: 149, CDR-H3 as depicted in SEQ ID NO: 150, CDR-L1 as depicted in SEQ ID NO: 316, CDR-L2 as depicted in SEQ ID NO: 317 and CDR-L3 as depicted in SEQ ID NO: 938, CDR-H1 as depicted in SEQ ID NO: 148, CDR-H2 as depicted in SEQ ID NO: 149, CDR-H3 as depicted in SEQ ID NO: 919, CDR-L1 as depicted in SEQ ID NO: 316, CDR-L2 as depicted in SEQ ID NO: 317 and CDR-L3 as depicted in SEQ ID NO: 938, CDR-H1 as depicted in SEQ ID NO: 142, CDR-H2 as depicted in SEQ ID NO: 143, CDR-H3 as depicted in SEQ ID NO: 144, CDR-L1 as depicted in SEQ ID NO: 310, CDR-L2 as depicted in SEQ ID NO: 311 and CDR-L3 as depicted in SEQ ID NO: 935, CDR-H1 as depicted in SEQ ID NO: 142, CDR-H2 as depicted in SEQ ID NO: 143, CDR-H3 as depicted in SEQ ID NO: 918, CDR-L1 as depicted in SEQ ID NO: 310, CDR-L2 as depicted in SEQ ID NO: 311 and CDR-L3 as depicted in SEQ ID NO: 935, CDR-H1 as depicted in SEQ ID NO: 142, CDR-H2 as depicted in SEQ ID NO: 143, CDR-H3 as depicted in SEQ ID NO: 918, CDR-L1 as depicted in SEQ ID NO: 310, CDR-L2 as depicted in SEQ ID NO: 311 and CDR-L3 as depicted in SEQ ID NO: 936, CDR-H1 as depicted in SEQ ID NO: 136, CDR-H2 as depicted in SEQ ID NO: 137, CDR-H3 as depicted in SEQ ID NO: 138, CDR-L1 as depicted in SEQ ID NO: 304, CDR-L2 as depicted in SEQ ID NO: 305 and CDR-L3 as depicted in SEQ ID NO: 933, CDR-H1 as depicted in SEQ ID NO: 136, CDR-H2 as depicted in SEQ ID NO: 137, CDR-H3 as depicted in SEQ ID NO: 917, CDR-L1 as depicted in SEQ ID NO: 304, CDR-L2 as depicted in SEQ ID NO: 305 and CDR-L3 as depicted in SEQ ID NO: 934, CDR-H1 as depicted in SEQ ID NO: 130, CDR-H2 as depicted in SEQ ID NO: 131, CDR-H3 as depicted in SEQ ID NO: 132, CDR-L1 as depicted in SEQ ID NO: 298, CDR-L2 as depicted in SEQ ID NO: 299 and CDR-L3 as depicted in SEQ ID NO: 930, CDR-H1 as depicted in SEQ ID NO: 130, CDR-H2 as depicted in SEQ ID NO: 131, CDR-H3 as depicted in SEQ ID NO: 916, CDR-L1 as depicted in SEQ ID NO: 298, CDR-L2 as depicted in SEQ ID NO: 299 and CDR-L3 as depicted in SEQ ID NO: 931, CDR-H1 as depicted in SEQ ID NO: 130, CDR-H2 as depicted in SEQ ID NO: 131, CDR-H3 as depicted in SEQ ID NO: 916, CDR-L1 as depicted in SEQ ID NO: 298, CDR-L2 as depicted in SEQ ID NO: 299 and CDR-L3 as depicted in SEQ ID NO: 932, CDR-H1 as depicted in SEQ ID NO: 1009, CDR-H2 as depicted in SEQ ID NO: 1010, CDR-H3 as depicted in SEQ ID NO: 1011, CDR-L1 as depicted in SEQ ID NO: 1012, CDR-L2 as depicted in SEQ ID NO: 1013 and CDR-L3 as depicted in SEQ ID NO: 1014,
   [0022] CDR-H1 as depicted in SEQ ID NO: 1022, CDR-H2 as depicted in SEQ ID NO: 1023, CDR-H3 as depicted in SEQ ID NO: 1024, CDR-L1 as depicted in SEQ ID NO: 1025, CDR-L2 as depicted in SEQ ID NO: 1026 and CDR-L3 as depicted in SEQ ID NO: 1027,
   [0023] CDR-H1 as depicted in SEQ ID NO: 1035, CDR-H2 as depicted in SEQ ID NO: 1036, CDR-H3 as depicted in SEQ ID NO: 1037, CDR-L1 as depicted in SEQ ID NO: 1038, CDR-L2 as depicted in SEQ ID NO: 1039 and CDR-L3 as depicted in SEQ ID NO: 1040,
   [0024] CDR-H1 as depicted in SEQ ID NO: 1074, CDR-H2 as depicted in SEQ ID NO: 1075, CDR-H3 as depicted in SEQ ID NO: 1076, CDR-L1 as depicted in SEQ ID NO: 1077, CDR-L2 as depicted in SEQ ID NO: 1078 and CDR-L3 as depicted in SEQ ID NO: 1079,
   [0025] CDR-H1 as depicted in SEQ ID NO: 1100, CDR-H2 as depicted in SEQ ID NO: 1101, CDR-H3 as depicted in SEQ ID NO: 1102, CDR-L1 as depicted in SEQ ID NO: 1103, CDR-L2 as depicted in SEQ ID NO: 1104 and CDR-L3 as depicted in SEQ ID NO: 1105,
   [0026] CDR-H1 as depicted in SEQ ID NO: 1113, CDR-H2 as depicted in SEQ ID NO: 1114, CDR-H3 as depicted in SEQ ID NO: 1115, CDR-L1 as depicted in SEQ ID NO: 1116, CDR-L2 as depicted in SEQ ID NO: 1117 and CDR-L3 as depicted in SEQ ID NO: 1118,
   [0027] CDR-H1 as depicted in SEQ ID NO: 1243, CDR-H2 as depicted in SEQ ID NO: 1244, CDR-H3 as depicted in SEQ ID NO: 1245, CDR-L1 as depicted in SEQ ID NO: 1246, CDR-L2 as depicted in SEQ ID NO: 1247 and CDR-L3 as depicted in SEQ ID NO: 1248,
   [0028] CDR-H1 as depicted in SEQ ID NO: 1256, CDR-H2 as depicted in SEQ ID NO: 1257, CDR-H3 as depicted in SEQ ID NO: 1258, CDR-L1 as depicted in SEQ ID NO: 1259, CDR-L2 as depicted in SEQ ID NO: 1260 and CDR-L3 as depicted in SEQ ID NO: 1261,
   [0029] CDR-H1 as depicted in SEQ ID NO: 1269, CDR-H2 as depicted in SEQ ID NO: 1270, CDR-H3 as depicted in SEQ ID NO: 1271, CDR-L1 as depicted in SEQ ID NO: 1272, CDR-L2 as depicted in SEQ ID NO: 1273 and CDR-L3 as depicted in SEQ ID NO: 1274,
   [0030] CDR-H1 as depicted in SEQ ID NO: 1282, CDR-H2 as depicted in SEQ ID NO: 1283, CDR-H3 as depicted in SEQ ID NO: 1284, CDR-L1 as depicted in SEQ ID NO: 1285, CDR-L2 as depicted in SEQ ID NO: 1286 and CDR-L3 as depicted in SEQ ID NO: 1287, and
   [0031] CDR-H1 as depicted in SEQ ID NO: 1295, CDR-H2 as depicted in SEQ ID NO: 1296, CDR-H3 as depicted in SEQ ID NO: 1297, CDR-L1 as depicted in SEQ ID NO: 1298, CDR-L2 as depicted in SEQ ID NO: 1299 and CDR-L3 as depicted in SEQ ID NO: 1300;
[0032] (c) CDR-H1 as depicted in SEQ ID NO: 94, CDR-H2 as depicted in SEQ ID NO: 95, CDR-H3 as depicted in SEQ ID NO: 96, CDR-L1 as depicted in SEQ ID NO: 262, CDR-L2 as depicted in SEQ ID NO: 263 and CDR-L3 as depicted in SEQ ID NO: 264, CDR-H1 as depicted in SEQ ID NO: 100, CDR-H2 as depicted in SEQ ID NO: 101, CDR-H3 as depicted in SEQ ID NO: 102, CDR-L1 as depicted in SEQ ID NO: 268, CDR-L2 as depicted in SEQ ID NO: 269 and CDR-L3 as depicted in SEQ ID NO: 270, CDR-H1 as depicted in SEQ ID NO: 118, CDR-H2 as depicted in SEQ ID NO: 119, CDR-H3 as depicted in SEQ ID NO: 120, CDR-L1 as depicted in SEQ ID NO: 286, CDR-L2 as depicted in SEQ ID NO: 287 and CDR-L3 as depicted in SEQ ID NO: 288, CDR-H1 as depicted in SEQ ID NO: 154, CDR-H2 as depicted in SEQ ID NO: 155, CDR-H3 as depicted in SEQ ID NO: 156, CDR-L1 as depicted in SEQ ID NO: 322, CDR-L2 as depicted in SEQ ID NO: 323 and CDR-L3 as depicted in SEQ ID NO: 324, CDR-H1 as depicted in SEQ ID NO: 100, CDR-H2 as depicted in SEQ ID NO: 101, CDR-H3 as depicted in SEQ ID NO: 912, CDR-L1 as depicted in SEQ ID NO: 268, CDR-L2 as depicted in SEQ ID NO: 269 and CDR-L3 as depicted in SEQ ID NO: 270, CDR-H1 as depicted in SEQ ID NO: 100, CDR-H2 as depicted in SEQ ID NO: 101, CDR-H3 as depicted in SEQ ID NO: 913, CDR-L1 as depicted in SEQ ID NO: 268, CDR-L2 as depicted in SEQ ID NO: 269 and CDR-L3 as depicted in SEQ ID NO: 270, CDR-H1 as depicted in SEQ ID NO: 94, CDR-H2 as depicted in SEQ ID NO: 95, CDR-H3 as depicted in SEQ ID NO: 910, CDR-L1 as depicted in SEQ ID NO: 262, CDR-L2 as depicted in SEQ ID NO: 263 and CDR-L3 as depicted in SEQ ID NO: 264, CDR-H1 as depicted in SEQ ID NO: 94, CDR-H2 as depicted in SEQ ID NO: 95, CDR-H3 as depicted in SEQ ID NO: 911, CDR-L1 as depicted in SEQ ID NO: 262, CDR-L2 as depicted in SEQ ID NO: 263 and CDR-L3 as depicted in SEQ ID NO: 264, CDR-H1 as depicted in SEQ ID NO: 118, CDR-H2 as depicted in SEQ ID NO: 119, CDR-H3 as depicted in SEQ ID NO: 120, CDR-L1 as depicted in SEQ ID NO: 286, CDR-L2 as depicted in SEQ ID NO: 287 and CDR-L3 as depicted in SEQ ID NO: 288, CDR-H1 as depicted in SEQ ID NO: 118, CDR-H2 as depicted in SEQ ID NO: 914, CDR-H3 as depicted in SEQ ID NO: 120, CDR-L1 as depicted in SEQ ID NO: 286, CDR-L2 as depicted in SEQ ID NO: 287 and CDR-L3 as depicted in SEQ ID NO: 288, CDR-H1 as depicted in SEQ ID NO: 154, CDR-H2 as depicted in SEQ ID NO: 155, CDR-H3 as depicted in SEQ ID NO: 920, CDR-L1 as depicted in SEQ ID NO: 322, CDR-L2 as depicted in SEQ ID NO: 323 and CDR-L3 as depicted in SEQ ID NO: 324,
[0033] CDR-H1 as depicted in SEQ ID NO: 996, CDR-H2 as depicted in SEQ ID NO: 997, CDR-H3 as depicted in SEQ ID NO: 998, CDR-L1 as depicted in SEQ ID NO: 999, CDR-L2 as depicted in SEQ ID NO: 1000 and CDR-L3 as depicted in SEQ ID NO: 1001,
   [0034] CDR-H1 as depicted in SEQ ID NO: 1048, CDR-H2 as depicted in SEQ ID NO: 1049, CDR-H3 as depicted in SEQ ID NO: 1050, CDR-L1 as depicted in SEQ ID NO: 1051, CDR-L2 as depicted in SEQ ID NO: 1052 and CDR-L3 as depicted in SEQ ID NO: 1053, and
   [0035] CDR-H1 as depicted in SEQ ID NO: 1087, CDR-H2 as depicted in SEQ ID NO: 1088, CDR-H3 as depicted in SEQ ID NO: 1089, CDR-L1 as depicted in SEQ ID NO: 1090, CDR-L2 as depicted in SEQ ID NO: 1091 and CDR-L3 as depicted in SEQ ID NO: 1092;
[0036] (d) CDR-H1 as depicted in SEQ ID NO: 4, CDR-H2 as depicted in SEQ ID NO: 5, CDR-H3 as depicted in SEQ ID NO: 6, CDR-L1 as depicted in SEQ ID NO: 172, CDR-L2 as depicted in SEQ ID NO: 173 and CDR-L3 as depicted in SEQ ID NO: 174, CDR-H1 as depicted in SEQ ID NO: 10, CDR-H2 as depicted in SEQ ID NO: 11, CDR-H3 as depicted in SEQ ID NO: 12, CDR-L1 as depicted in SEQ ID NO: 178, CDR-L2 as depicted in SEQ ID NO: 179 and CDR-L3 as depicted in SEQ ID NO: 180, CDR-H1 as depicted in SEQ ID NO: 28, CDR-H2 as depicted in SEQ ID NO: 29, CDR-H3 as depicted in SEQ ID NO: 30, CDR-L1 as depicted in SEQ ID NO: 196, CDR-L2 as depicted in SEQ ID NO: 197 and CDR-L3 as depicted in SEQ ID NO: 198, CDR-H1 as depicted in SEQ ID NO: 34, CDR-H2 as depicted in SEQ ID NO: 35, CDR-H3 as depicted in SEQ ID NO: 36, CDR-L1 as depicted in SEQ ID NO: 202, CDR-L2 as depicted in SEQ ID NO: 203 and CDR-L3 as depicted in SEQ ID NO: 204, CDR-H1 as depicted in SEQ ID NO: 46, CDR-H2 as depicted in SEQ ID NO: 47, CDR-H3 as depicted in SEQ ID NO: 48, CDR-L1 as depicted in SEQ ID NO: 214, CDR-L2 as depicted in SEQ ID NO: 215 and CDR-L3 as depicted in SEQ ID NO: 216, CDR-H1 as depicted in SEQ ID NO: 58, CDR-H2 as depicted in SEQ ID NO: 59, CDR-H3 as depicted in SEQ ID NO: 60, CDR-L1 as depicted in SEQ ID NO: 226, CDR-L2 as depicted in SEQ ID NO: 227 and CDR-L3 as depicted in SEQ ID NO: 228, CDR-H1 as depicted in SEQ ID NO: 64, CDR-H2 as depicted in SEQ ID NO: 65, CDR-H3 as depicted in SEQ ID NO: 66, CDR-L1 as depicted in SEQ ID NO: 232, CDR-L2 as depicted in SEQ ID NO: 233 and CDR-L3 as depicted in SEQ ID NO: 234, CDR-H1 as depicted in SEQ ID NO: 70, CDR-H2 as depicted in SEQ ID NO: 71, CDR-H3 as depicted in SEQ ID NO: 72, CDR-L1 as depicted in SEQ ID NO: 238, CDR-L2 as depicted in SEQ ID NO: 239 and CDR-L3 as depicted in SEQ ID NO: 240, CDR-H1 as depicted in SEQ ID NO: 160, CDR-H2 as depicted in SEQ ID NO: 161, CDR-H3 as depicted in SEQ ID NO: 162, CDR-L1 as depicted in SEQ ID NO: 328, CDR-L2 as depicted in SEQ ID NO: 329 and CDR-L3 as depicted in SEQ ID NO: 330, CDR-H1 as depicted in SEQ ID NO: 46, CDR-H2 as depicted in SEQ ID NO: 47, CDR-H3 as depicted in SEQ ID NO: 48, CDR-L1 as depicted in SEQ ID NO: 924, CDR-L2 as depicted in SEQ ID NO: 215 and CDR-L3 as depicted in SEQ ID NO: 216, CDR-H1 as depicted in SEQ ID NO: 46, CDR-H2 as depicted in SEQ ID NO: 47, CDR-H3 as depicted in SEQ ID NO: 902, CDR-L1 as depicted in SEQ ID NO: 924, CDR-L2 as depicted in SEQ ID NO: 215 and CDR-L3 as depicted in SEQ ID NO: 216, CDR-H1 as depicted in SEQ ID NO: 46, CDR-H2 as depicted in SEQ ID NO: 47, CDR-H3 as depicted in SEQ ID NO: 903, CDR-L1 as depicted in SEQ ID NO: 924, CDR-L2 as depicted in SEQ ID NO: 215 and CDR-L3 as depicted in SEQ ID NO: 216, CDR-H1 as depicted in SEQ ID NO: 46, CDR-H2 as depicted in SEQ ID NO: 47, CDR-H3 as depicted in SEQ ID NO: 48, CDR-L1 as depicted in SEQ ID NO: 925, CDR-L2 as depicted in SEQ ID NO: 215 and CDR-L3 as depicted in SEQ ID NO: 216, CDR-H1 as depicted in SEQ ID NO: 70, CDR-H2 as depicted in SEQ ID NO: 907, CDR-H3 as depicted in SEQ ID NO: 72, CDR-L1 as depicted in SEQ ID NO: 238, CDR-L2 as depicted in SEQ ID NO: 239 and CDR-L3 as depicted in SEQ ID NO: 240, CDR-H1 as depicted in SEQ ID NO: 70, CDR-H2 as depicted in SEQ ID NO: 907, CDR-H3 as depicted in SEQ ID NO: 908, CDR-L1 as depicted in SEQ ID NO: 238, CDR-L2 as depicted in SEQ ID NO: 239 and CDR-L3 as depicted in SEQ ID NO: 240, CDR-H1 as depicted in SEQ ID NO: 28, CDR-H2 as depicted in SEQ ID NO: 901, CDR-H3 as depicted in SEQ ID NO: 30, CDR-L1 as depicted in SEQ ID NO: 922, CDR-L2 as depicted in SEQ ID NO: 197 and CDR-L3 as depicted in SEQ ID NO: 923, CDR-H1 as depicted in SEQ ID NO: 58, CDR-H2 as depicted in SEQ ID NO: 905, CDR-H3 as depicted in SEQ ID NO: 906, CDR-L1 as depicted in SEQ ID NO: 226, CDR-L2 as depicted in SEQ ID NO: 227 and CDR-L3 as depicted in SEQ ID NO: 228, CDR-H1 as depicted in SEQ ID NO: 58, CDR-H2 as depicted in SEQ ID NO: 905, CDR-H3 as depicted in SEQ ID NO: 60, CDR-L1 as depicted in SEQ ID NO: 226, CDR-L2 as depicted in SEQ ID NO: 227 and CDR-L3 as depicted in SEQ ID NO: 228, CDR-H1 as depicted in SEQ ID NO: 160, CDR-H2 as depicted in SEQ ID NO: 161, CDR-H3 as depicted in SEQ ID NO: 162, CDR-L1 as depicted in SEQ ID NO: 939, CDR-L2 as depicted in SEQ ID NO: 329 and CDR-L3 as depicted in SEQ ID NO: 330, CDR-H1 as depicted in SEQ ID NO: 160, CDR-H2 as depicted in SEQ ID NO: 921, CDR-H3 as depicted in SEQ ID NO: 162, CDR-L1 as depicted in SEQ ID NO: 939, CDR-L2 as depicted in SEQ ID NO: 329 and CDR-L3 as depicted in SEQ ID NO: 940, CDR-H1 as depicted in SEQ ID NO: 160, CDR-H2 as depicted in SEQ ID NO: 161, CDR-H3 as depicted in SEQ ID NO: 162, CDR-L1 as depicted in SEQ ID NO: 941, CDR-L2 as depicted in SEQ ID NO: 329 and CDR-L3 as depicted in SEQ ID NO: 330, CDR-H1 as depicted in SEQ ID NO: 28, CDR-H2 as depicted in SEQ ID NO: 29, CDR-H3 as depicted in SEQ ID NO: 30, CDR-L1 as depicted in SEQ ID NO: 196, CDR-L2 as depicted in SEQ ID NO: 197 and CDR-L3 as depicted in SEQ ID NO: 923, CDR-H1 as depicted in SEQ ID NO: 28, CDR-H2 as depicted in SEQ ID NO: 29, CDR-H3 as depicted in SEQ ID NO: 30, CDR-L1 as depicted in SEQ ID NO: 922, CDR-L2 as depicted in SEQ ID NO: 197 and CDR-L3 as depicted in SEQ ID NO: 923, CDR-H1 as depicted in SEQ ID NO: 28, CDR-H2 as depicted in SEQ ID NO: 901, CDR-H3 as depicted in SEQ ID NO: 30, CDR-L1 as depicted in SEQ ID NO: 922, CDR-L2 as depicted in SEQ ID NO: 197 and CDR-L3 as depicted in SEQ ID NO: 923, CDR-H1 as depicted in SEQ ID NO: 28, CDR-H2 as depicted in SEQ ID NO: 29, CDR-H3 as depicted in SEQ ID NO: 30, CDR-L1 as depicted in SEQ ID NO: 939, CDR-L2 as depicted in SEQ ID NO: 329 and CDR-L3 as depicted in SEQ ID NO: 330, CDR-H1 as depicted in SEQ ID NO: 970, CDR-H2 as depicted in SEQ ID NO: 971, CDR-H3 as depicted in SEQ ID NO: 972, CDR-L1 as depicted in SEQ ID NO: 973, CDR-L2 as depicted in SEQ ID NO: 974 and CDR-L3 as depicted in SEQ ID NO: 975, CDR-H1 as depicted in SEQ ID NO: 1061, CDR-H2 as depicted in SEQ ID NO: 1062, CDR-H3 as depicted in SEQ ID NO: 1063, CDR-L1 as depicted in SEQ ID NO: 1064, CDR-L2 as depicted in SEQ ID NO: 1065 and CDR-L3 as depicted in SEQ ID NO: 1066,
   [0037] CDR-H1 as depicted in SEQ ID NO: 1139, CDR-H2 as depicted in SEQ ID NO: 1140, CDR-H3 as depicted in SEQ ID NO: 1141, CDR-L1 as depicted in SEQ ID NO: 1142, CDR-L2 as depicted in SEQ ID NO: 1143 and CDR-L3 as depicted in SEQ ID NO: 1144,
   [0038] CDR-H1 as depicted in SEQ ID NO: 1152, CDR-H2 as depicted in SEQ ID NO: 1153, CDR-H3 as depicted in SEQ ID NO: 1154, CDR-L1 as depicted in SEQ ID NO: 1155, CDR-L2 as depicted in SEQ ID NO: 1156 and CDR-L3 as depicted in SEQ ID NO: 1157,
   [0039] CDR-H1 as depicted in SEQ ID NO: 1178, CDR-H2 as depicted in SEQ ID NO: 1179, CDR-H3 as depicted in SEQ ID NO: 1180, CDR-L1 as depicted in SEQ ID NO: 1181, CDR-L2 as depicted in SEQ ID NO: 1182 and CDR-L3 as depicted in SEQ ID NO: 1183,
   [0040] CDR-H1 as depicted in SEQ ID NO: 1191, CDR-H2 as depicted in SEQ ID NO: 1192, CDR-H3 as depicted in SEQ ID NO: 1193, CDR-L1 as depicted in SEQ ID NO: 1194, CDR-L2 as depicted in SEQ ID NO: 1195 and CDR-L3 as depicted in SEQ ID NO: 1196,
   [0041] CDR-H1 as depicted in SEQ ID NO: 1204, CDR-H2 as depicted in SEQ ID NO: 1205, CDR-H3 as depicted in SEQ ID NO: 1206, CDR-L1 as depicted in SEQ ID NO: 1207, CDR-L2 as depicted in SEQ ID NO: 1208 and CDR-L3 as depicted in SEQ ID NO: 1209,
   [0042] CDR-H1 as depicted in SEQ ID NO: 1217, CDR-H2 as depicted in SEQ ID NO: 1218, CDR-H3 as depicted in SEQ ID NO: 1219, CDR-L1 as depicted in SEQ ID NO: 1220, CDR-L2 as depicted in SEQ ID NO: 1221 and CDR-L3 as depicted in SEQ ID NO: 1222,
   [0043] CDR-H1 as depicted in SEQ ID NO: 1230, CDR-H2 as depicted in SEQ ID NO: 1231, CDR-H3 as depicted in SEQ ID NO: 1232, CDR-L1 as depicted in SEQ ID NO: 1233, CDR-L2 as depicted in SEQ ID NO: 1234 and CDR-L3 as depicted in SEQ ID NO: 1235,
   [0044] CDR-H1 as depicted in SEQ ID NO: 1308, CDR-H2 as depicted in SEQ ID NO: 1309, CDR-H3 as depicted in SEQ ID NO: 1310, CDR-L1 as depicted in SEQ ID NO: 1311, CDR-L2 as depicted in SEQ ID NO: 1312 and CDR-L3 as depicted in SEQ ID NO: 1313,
   [0045] CDR-H1 as depicted in SEQ ID NO: 1321, CDR-H2 as depicted in SEQ ID NO: 1322, CDR-H3 as depicted in SEQ ID NO: 1323, CDR-L1 as depicted in SEQ ID NO: 1324, CDR-L2 as depicted in SEQ ID NO: 1325 and CDR-L3 as depicted in SEQ ID NO: 1326,
   [0046] CDR-H1 as depicted in SEQ ID NO: 1373, CDR-H2 as depicted in SEQ ID NO: 1374, CDR-H3 as depicted in SEQ ID NO: 1375, CDR-L1 as depicted in SEQ ID NO: 1376, CDR-L2 as depicted in SEQ ID NO: 1377 and CDR-L3 as depicted in SEQ ID NO: 1378,
   [0047] CDR-H1 as depicted in SEQ ID NO: 1386, CDR-H2 as depicted in SEQ ID NO: 1387, CDR-H3 as depicted in SEQ ID NO: 1388, CDR-L1 as depicted in SEQ ID NO: 1389, CDR-L2 as depicted in SEQ ID NO: 1390 and CDR-L3 as depicted in SEQ ID NO: 1391,
   [0048] CDR-H1 as depicted in SEQ ID NO: 1399, CDR-H2 as depicted in SEQ ID NO: 1400, CDR-H3 as depicted in SEQ ID NO: 1401, CDR-L1 as depicted in SEQ ID NO: 1402, CDR-L2 as depicted in SEQ ID NO: 1403 and CDR-L3 as depicted in SEQ ID NO: 1404,
   [0049] CDR-H1 as depicted in SEQ ID NO: 1412, CDR-H2 as depicted in SEQ ID NO: 1413, CDR-H3 as depicted in SEQ ID NO: 1414, CDR-L1 as depicted in SEQ ID NO: 1415, CDR-L2 as depicted in SEQ ID NO: 1416 and CDR-L3 as depicted in SEQ ID NO: 1417; and
[0050] (e) CDR-H1 as depicted in SEQ ID NO: 76, CDR-H2 as depicted in SEQ ID NO: 77, CDR-H3 as depicted in SEQ ID NO: 78, CDR-L1 as depicted in SEQ ID NO: 244, CDR-L2 as depicted in SEQ ID NO: 245 and CDR-L3 as depicted in SEQ ID NO: 246, CDR-H1 as depicted in SEQ ID NO: 88, CDR-H2 as depicted in SEQ ID NO: 89, CDR-H3 as depicted in SEQ ID NO: 90, CDR-L1 as depicted in SEQ ID NO: 256, CDR-L2 as depicted in SEQ ID NO: 257 and CDR-L3 as depicted in SEQ ID NO: 258, CDR-H1 as depicted in SEQ ID NO: 106, CDR-H2 as depicted in SEQ ID NO: 107, CDR-H3 as depicted in SEQ ID NO: 108, CDR-L1 as depicted in SEQ ID NO: 274, CDR-L2 as depicted in SEQ ID NO: 275 and CDR-L3 as depicted in SEQ ID NO: 276, CDR-H1 as depicted in SEQ ID NO: 112, CDR-H2 as depicted in SEQ ID NO: 113, CDR-H3 as depicted in SEQ ID NO: 114, CDR-L1 as depicted in SEQ ID NO: 280, CDR-L2 as depicted in SEQ ID NO: 281 and CDR-L3 as depicted in SEQ ID NO: 282,
   [0051] CDR-H1 as depicted in SEQ ID NO: 106, CDR-H2 as depicted in SEQ ID NO: 107, CDR-H3 as depicted in SEQ ID NO: 108, CDR-L1 as depicted in SEQ ID NO: 274, CDR-L2 as depicted in SEQ ID NO: 275 and CDR-L3 as depicted in SEQ ID NO: 276, and
   [0052] CDR-H1 as depicted in SEQ ID NO: 983, CDR-H2 as depicted in SEQ ID NO: 984, CDR-H3 as depicted in SEQ ID NO: 985, CDR-L1 as depicted in SEQ ID NO: 986, CDR-L2 as depicted in SEQ ID NO: 987 and CDR-L3 as depicted in SEQ ID NO: 988.

[0053] In a further embodiment of the antibody construct of the invention the first binding domain comprises a VH region selected from the group consisting of VH regions
[0054] (a) as depicted in SEQ ID NO: 362, SEQ ID NO: 364, SEQ ID NO: 485, SEQ ID NO: 486, SEQ ID NO: 487, SEQ ID NO: 492, SEQ ID NO: 493, SEQ ID NO: 494, SEQ ID NO: 495, SEQ ID NO: 1133, SEQ ID NO: 1172, SEQ ID NO: 1341, SEQ ID NO: 1354, SEQ ID NO: 1367, SEQ ID NO: 1432, and SEQ ID NO: 1445;
[0055] (b) as depicted in SEQ ID NO: 342, SEQ ID NO: 366, SEQ ID NO: 370, SEQ ID NO: 344, SEQ ID NO: 372, SEQ ID NO: 368, SEQ ID NO: 496, SEQ ID NO: 497, SEQ ID NO: 498, SEQ ID NO: 499, SEQ ID NO: 500, SEQ ID NO: 508, SEQ ID NO: 509, SEQ ID NO: 510, SEQ ID NO: 511, SEQ ID NO: 512, SEQ ID NO: 519, SEQ ID NO: 520, SEQ ID NO: 521, SEQ ID NO: 522, SEQ ID NO: 523, SEQ ID NO: 524, SEQ ID NO: 525, SEQ ID NO: 526, SEQ ID NO: 527, SEQ ID NO: 528, SEQ ID NO: 529, SEQ ID NO: 530, SEQ ID NO: 531, SEQ ID NO: 532, SEQ ID NO: 533, SEQ ID NO: 534, SEQ ID NO: 535, SEQ ID NO: 536, SEQ ID NO: 537, SEQ ID NO: 538, SEQ ID NO: 1016, SEQ ID NO: 1029, SEQ ID NO: 1042, SEQ ID NO: 1081, SEQ ID NO: 1107, SEQ ID NO: 1120, SEQ ID NO: 1250, SEQ ID NO: 1263, SEQ ID NO: 1276, SEQ ID NO: 1289, and SEQ ID NO: 1302;
[0056] (c) as depicted in SEQ ID NO: 338, SEQ ID NO: 354, SEQ ID NO: 378, SEQ ID NO: 356, SEQ ID NO: 476, SEQ ID NO: 477, SEQ ID NO: 478, SEQ ID NO: 479, SEQ ID NO: 480, SEQ ID NO: 481, SEQ ID NO: 482, SEQ ID NO: 483, SEQ ID NO: 484, SEQ ID NO: 501, SEQ ID NO: 502, SEQ ID NO: 503, SEQ ID NO: 504, SEQ ID NO: 505, SEQ ID NO: 506, SEQ ID NO: 517, SEQ ID NO: 518, SEQ ID NO: 1003, SEQ ID NO: 1055, and SEQ ID NO: 1094;
[0057] (d) as depicted in SEQ ID NO: 352, SEQ ID NO: 360, SEQ ID NO: 388, SEQ ID NO: 386, SEQ ID NO: 340, SEQ ID NO: 346, SEQ ID NO: 374, SEQ ID NO: 348, SEQ ID NO: 390, SEQ ID NO: 463, SEQ ID NO: 464, SEQ ID NO: 465, SEQ ID NO: 466, SEQ ID NO: 467, SEQ ID NO: 468, SEQ ID NO: 469, SEQ ID NO: 470, SEQ ID NO: 471, SEQ ID NO: 472, SEQ ID NO: 473, SEQ ID NO: 474, SEQ ID NO: 475, SEQ ID NO: 488, SEQ ID NO: 489, SEQ ID NO: 490, SEQ ID NO: 491, SEQ ID NO: 513, SEQ ID NO: 514, SEQ ID NO: 515, SEQ ID NO: 516, SEQ ID NO: 540, SEQ ID NO: 541, SEQ ID NO: 542, SEQ ID NO: 543, SEQ ID NO: 977, SEQ ID NO: 1068, SEQ ID NO: 1146, SEQ ID NO: 1159, SEQ ID NO: 1185, SEQ ID NO: 1198, SEQ ID NO: 1211, SEQ ID NO: 1224, SEQ ID NO: 1237, SEQ ID NO: 1315, SEQ ID NO: 1328, SEQ ID NO: 1380, SEQ ID NO: 1393, SEQ ID NO: 1406, and SEQ ID NO: 1419; and
[0058] (e) as depicted in SEQ ID NO: 376, SEQ ID NO: 392, SEQ ID NO: 358, SEQ ID NO: 350, SEQ ID NO: 507, and SEQ ID NO: 990.

[0059] In another embodiment of the antibody construct of the invention the first binding domain comprises a VL region selected from the group consisting of VL regions
[0060] (a) as depicted in SEQ ID NO: 418, SEQ ID NO: 420, SEQ ID NO: 580, SEQ ID NO: 581, SEQ ID NO: 582, SEQ ID NO: 587, SEQ ID NO: 588, SEQ ID NO: 589, SEQ ID NO: 590, SEQ ID NO: 1135, SEQ ID NO: 1174, SEQ ID NO: 1343, SEQ ID NO: 1356, SEQ ID NO: 1369, SEQ ID NO: 1434, and SEQ ID NO: 1447;
[0061] (b) as depicted in SEQ ID NO: 398, SEQ ID NO: 422, SEQ ID NO: 426, SEQ ID NO: 400, SEQ ID NO: 428, SEQ ID NO: 424, SEQ ID NO: 591, SEQ ID NO: 592, SEQ ID NO: 593, SEQ ID NO: 594, SEQ ID NO: 595, SEQ ID NO: 603, SEQ ID NO: 604, SEQ ID NO: 605, SEQ ID NO: 606, SEQ ID NO: 607, SEQ ID NO: 614, SEQ ID NO: 615, SEQ ID NO: 616, SEQ ID NO: 617, SEQ ID NO: 618, SEQ ID NO: 619, SEQ ID NO: 620, SEQ ID NO: 621, SEQ ID NO: 622, SEQ ID NO: 623, SEQ ID NO: 624, SEQ ID NO: 625, SEQ ID NO: 626, SEQ ID NO: 627, SEQ ID NO: 628, SEQ ID NO: 629, SEQ ID NO: 630, SEQ ID NO: 631, SEQ ID NO: 632, SEQ ID NO: 633, SEQ ID NO: 1018, SEQ ID NO: 1031, SEQ ID NO: 1044, SEQ ID NO: 1083, SEQ ID NO: 1109, SEQ ID NO: 1122, SEQ ID NO: 1252, SEQ ID NO: 1265, SEQ ID NO: 1278, SEQ ID NO: 1291, and SEQ ID NO: 1304;
[0062] (c) as depicted in SEQ ID NO: 394, SEQ ID NO: 410, SEQ ID NO: 434, SEQ ID NO: 412, SEQ ID NO: 571, SEQ ID NO: 572, SEQ ID NO: 573, SEQ ID NO: 574, SEQ ID NO: 575, SEQ ID NO: 576, SEQ ID NO: 577, SEQ ID NO: 578, SEQ ID NO: 579, SEQ ID NO: 596, SEQ ID NO: 597, SEQ ID NO: 598, SEQ ID NO: 599, SEQ ID NO: 600, SEQ ID NO: 601, SEQ ID NO: 612, SEQ ID NO: 613, SEQ ID NO: 1005, SEQ ID NO: 1057, and SEQ ID NO: 1096;
[0063] (d) as depicted in SEQ ID NO: 408, SEQ ID NO: 416, SEQ ID NO: 444, SEQ ID NO: 442, SEQ ID NO: 396, SEQ ID NO: 402, SEQ ID NO: 430, SEQ ID NO: 404, SEQ ID NO: 446, SEQ ID NO: 558, SEQ ID NO: 559, SEQ ID NO: 560, SEQ ID NO: 561, SEQ ID NO: 562, SEQ ID NO: 563, SEQ ID NO: 564, SEQ ID NO: 565, SEQ ID NO: 566, SEQ ID NO: 567, SEQ ID NO: 568, SEQ ID NO: 569, SEQ ID NO: 570, SEQ ID NO: 583, SEQ ID NO: 584, SEQ ID NO: 585, SEQ ID NO: 586, SEQ ID NO: 608, SEQ ID NO: 609, SEQ ID NO: 610, SEQ ID NO: 611, SEQ ID NO: 635, SEQ ID NO: 636, SEQ ID NO: 637, SEQ ID NO: 638, SEQ ID NO: 979, SEQ ID NO: 1070, SEQ ID NO: 1148, SEQ ID NO: 1161, SEQ ID NO: 1187, SEQ ID NO: 1200, SEQ ID NO: 1213, SEQ ID NO: 1226, SEQ ID NO: 1239, SEQ ID NO: 1317, SEQ ID NO: 1330, SEQ ID NO: 1382, SEQ ID NO: 1395, SEQ ID NO: 1408, and SEQ ID NO: 1421; and
[0064] (e) as depicted in SEQ ID NO: 432, SEQ ID NO: 448, SEQ ID NO: 414, SEQ ID NO: 406, SEQ ID NO: 602, and SEQ ID NO: 992.

[0065] The invention further provides an embodiment of the antibody construct of the invention, wherein the first binding domain comprises a VH region and a VL region selected from the group consisting of:
[0066] (1) pairs of a VH region and a VL region as depicted in SEQ ID NOs: 362+418, SEQ ID NOs: 364+420, SEQ ID NOs: 485+580, SEQ ID NOs: 486+581, SEQ ID NOs: 487+582, SEQ ID NOs: 492+587, SEQ ID NOs: 493+588, SEQ ID NOs: 494+589, SEQ ID NOs: 495+590, SEQ ID NOs: 1133+1135, SEQ ID NOs: 1172+1174, SEQ ID NOs: 1341+1343, SEQ ID NOs: 1354+1356, SEQ ID NOs: 1367+1369, SEQ ID NOs: 1432+1434, and SEQ ID NOs: 1445+1447;
[0067] (2) pairs of a VH region and a VL region as depicted in SEQ ID NOs: 342+398, SEQ ID NOs: 366+422, SEQ ID NOs: 370+426, SEQ ID NOs: 344+400, SEQ ID NOs: 372+428, SEQ ID NOs: 368+424, SEQ ID NOs: 496+591, SEQ ID NOs: 497+592, SEQ ID NOs: 498+593, SEQ ID NOs: 499+594, SEQ ID NOs: 500+595, SEQ ID NOs: 508+603, SEQ ID NOs: 509+604, SEQ ID NOs: 510+605, SEQ ID NOs: 511+606, SEQ ID NOs: 512+607, SEQ ID NOs: 519+614, SEQ ID NOs: 520+615, SEQ ID NOs: 521+616, SEQ ID NOs: 522+617, SEQ ID NOs: 523+618, SEQ ID NOs: 524+619, SEQ ID NOs: 525+620, SEQ ID NOs: 526+621, SEQ ID NOs: 527+622, SEQ ID NOs: 528+623, SEQ ID NOs: 529+624, SEQ ID NOs: 530+625, SEQ ID NOs: 531+626, SEQ ID NOs: 532+627, SEQ ID NOs: 533+628, SEQ ID NOs: 534+629, SEQ ID NOs: 535+630, SEQ ID NOs: 536+631, SEQ ID NOs: 537+632, SEQ ID NOs: 538+633, SEQ ID NOs: 1016+1018, SEQ ID NOs: 1029+1031, SEQ ID NOs: 1042+1044, SEQ ID NOs: 1081+1083, SEQ ID NOs: 1107+1109, SEQ ID NOs: 1120+1122, SEQ ID NOs: 1250+1252, SEQ ID NOs: 1263+1265, SEQ ID NOs: 1276+1278, SEQ ID NOs: 1289+1291, and SEQ ID NOs: 1302+1304;
[0068] (3) pairs of a VH region and a VL region as depicted in SEQ ID NOs: 338+394, SEQ ID NOs: 354+410, SEQ ID NOs: 378+434, SEQ ID NOs: 356+412, SEQ ID NOs: 476+571, SEQ ID NOs: 477+572, SEQ ID NOs: 478+573, SEQ ID NOs: 479+574, SEQ ID NOs: 480+575, SEQ ID NOs: 481+576, SEQ ID NOs: 482+577, SEQ ID NOs: 483+578, SEQ ID NOs: 484+579, SEQ ID NOs: 501+596, SEQ ID NOs: 502+597, SEQ ID NOs: 503+598, SEQ ID NOs: 504+599, SEQ ID NOs: 505+600, SEQ ID NOs: 506+601, SEQ ID NOs: 517+612, SEQ ID NOs: 518+613, SEQ ID NOs: 1003+1005, SEQ ID NOs: 1055+1057, and SEQ ID NOs: 1094+1096;
[0069] (4) pairs of a VH region and a VL region as depicted in SEQ ID NOs: 352+408, SEQ ID NOs: 360+416, SEQ ID NOs: 388+444, SEQ ID NOs: 386+442, SEQ ID NOs: 340+396, SEQ ID NOs: 346+402, SEQ ID NOs: 374+430, SEQ ID NOs: 348+404, SEQ ID NOs: 390+446, SEQ ID NOs: 463+558, SEQ ID NOs: 464+559, SEQ ID NOs: 465+560, SEQ ID NOs: 466+561, SEQ ID NOs: 467+562, SEQ ID NOs: 468+563, SEQ ID NOs: 469+564, SEQ ID NOs: 470+565, SEQ ID NOs: 471+566, SEQ ID NOs: 472+567, SEQ ID NOs: 473+568, SEQ ID NOs: 474+569, SEQ ID NOs: 475+570, SEQ ID NOs: 488+583, SEQ ID NOs: 489+584, SEQ ID NOs: 490+585, SEQ ID NOs: 491+586, SEQ ID NOs: 513+608, SEQ ID NOs: 514+609, SEQ ID NOs: 515+610, SEQ ID NOs: 516+611, SEQ ID NOs: 540+635, SEQ ID NOs: 541+636, SEQ ID NOs: 542+637, SEQ ID NOs: 543+638, SEQ ID NOs: 977+979, SEQ ID NOs: 1068+1070, SEQ ID NOs: 1146+1148, SEQ ID NOs: 1159+1161, SEQ ID NOs: 1185+1187, SEQ ID NOs: 1198+1200, SEQ ID NOs: 1211+1213, SEQ ID NOs: 1224+1226, SEQ ID NOs: 1237+1239, SEQ ID NOs: 1315+1317, SEQ ID NOs: 1328+1330, SEQ ID NOs: 1380,+1382 SEQ ID NOs: 1393+1395, SEQ ID NOs: 1406+1408, and SEQ ID NOs: 1419+1421; and
[0070] (5) pairs of a VH region and a VL region as depicted in SEQ ID NOs: 376+432, SEQ ID NOs: 392+448, SEQ ID NOs: 358+414, SEQ ID NOs: 350+406, SEQ ID NOs: 507+602, and SEQ ID NOs: 990+992.

[0071] In a further embodiment of the invention the antibody construct is in a format selected from the group consisting of (scFv)₂, (single domain mAb)₂, scFv-single domain mAb, diabodies and oligomers thereof.

[0072] In a preferred embodiment the first binding domain comprises an amino acid sequence selected from the group consisting of
[0073] (a) as depicted in SEQ ID NO: 117, SEQ ID NO: 1137, SEQ ID NO: 1176, SEQ ID NO: 1345, SEQ ID NO: 1358, SEQ ID NO: 1371, SEQ ID NO: 1436, and SEQ ID NO: 1449;
[0074] (b) as depicted in SEQ ID NO: 1020, SEQ ID NO: 1033, SEQ ID NO: 1046, SEQ ID NO: 1085, SEQ ID NO: 1111, SEQ ID NO: 1124, SEQ ID NO: 1254, SEQ ID NO: 1267, SEQ ID NO: 1280, SEQ ID NO: 1293, and SEQ ID NO: 1306;
[0075] (c) as depicted in SEQ ID NO: 1007, SEQ ID NO: 1059, and SEQ ID NO: 1098;
[0076] (d) as depicted in SEQ ID NO: 981, SEQ ID NO: 1072, SEQ ID NO: 1150, SEQ ID NO: 1163, SEQ ID NO: 1189, SEQ ID NO: 1202, SEQ ID NO: 1215, SEQ ID NO: 1228, SEQ ID NO: 1241, SEQ ID NO: 1319, SEQ ID NO: 1332, SEQ ID NO: 1384, SEQ ID NO: 1397, SEQ ID NO: 1410, and SEQ ID NO: 1423; and
[0077] (e) as depicted in SEQ ID NO: 994.

[0078] In another embodiment of the antibody construct of the invention the second binding domain is capable of binding to human and Callithrix jacchus, Saguinus Oedipus or Saimiri sciureus CD3 epsilon.

[0079] In a preferred embodiment the antibody construct of the invention has an amino acid sequence selected from the group consisting of
[0080] (a) as depicted in SEQ ID NO: 1138, SEQ ID NO: 1177, SEQ ID NO: 1346, SEQ ID NO: 1359, SEQ ID NO: 1372, SEQ ID NO: 1437, and SEQ ID NO: 1450;
[0081] (b) as depicted in SEQ ID NO: 1021, SEQ ID NO: 1034, SEQ ID NO: 1047, SEQ ID NO: 1086, SEQ ID NO: 1112, SEQ ID NO: 1125, SEQ ID NO: 1255, SEQ ID NO: 1268, SEQ ID NO: 1281, SEQ ID NO: 1294, and SEQ ID NO: 1307;
[0082] (c) as depicted in SEQ ID NO: 1008, SEQ ID NO: 1060, and SEQ ID NO: 1099;
[0083] (d) as depicted in SEQ ID NO: 982, SEQ ID NO: 1073, SEQ ID NO: 1151, SEQ ID NO: 1164, SEQ ID NO: 1190, SEQ ID NO: 1203, SEQ ID NO: 1216, SEQ ID NO: 1229, SEQ ID NO: 1242, SEQ ID NO: 1320, SEQ ID NO: 1333, SEQ ID NO: 1385, SEQ ID NO: 1398, SEQ ID NO: 1411, and SEQ ID NO: 1424; and
[0084] (e) as depicted in SEQ ID NO: 995.

[0085] The invention further provides a nucleic acid sequence encoding an antibody construct of the invention.

[0086] Furthermore, the invention provides a vector comprising a nucleic acid sequence of the invention. Moreover, the invention provides a host cell transformed or transfected with the nucleic acid sequence of the invention.

[0087] In a further embodiment the invention provides a process for the production of a antibody construct of the invention, said process comprising culturing a host cell of the invention under conditions allowing the expression of the antibody construct of the invention and recovering the produced antibody construct from the culture.

[0088] Moreover, the invention provides a pharmaceutical composition comprising an antibody construct of the invention or produced according to the process of the invention

[0089] In one embodiment the invention provides the antibody construct of the invention or produced according to the process of the invention for use in the prevention, treatment or amelioration of a melanoma disease or metastatic melanoma disease.

[0090] The invention also provides a method for the treatment or amelioration of a melanoma disease or metastatic melanoma disease, comprising the step of administering to a subject in need thereof the antibody construct of the invention or produced according to the process of the invention.

[0091] In a preferred embodiment method of use of the invention the melanoma disease or metastatic melanoma disease is selected from the group consisting of superficial spreading melanoma, lentigo maligna, lentigo maligna melanoma, acral lentiginous melanoma and nodular melanoma.

[0092] In a further embodiment, the invention provides a kit comprising an antibody construct of the invention, or produced according to the process of the invention, a vector of the invention, and/or a host cell of the invention.

### BRIEF DESCRIPTION OF THE DRAWINGS

[0093] FIG. 1:

[0094] FIG. 1 depicts cell viability data of Colo-699 cells that have been treated with fully human anti-CDH19 antibodies and a high concentration of a goat anti-human Fc monovalent Fab conjugated with DM1 (DM1-Fab) at a drug-antibody ratio (DAR) (˜1.3).

[0095] FIG. 2:

[0096] FIG. 2 depicts the average cell viability data from a CHL-1 assay plotted against the average cell viability data from the Colo-699 assay.

[0097] FIG. 3:

[0098] FIG. 3 shows the relative expression of CDH19 mRNA in metastatic and primary melanoma samples.

[0099] FIG. 4:

[0100] FIG. 4 shows the expression of CDH19 protein in human tumor samples by IHC.

[0101] FIG. 5:

[0102] FIG. 5 shows the results of the analysis of tumor cell lines by flow cytometry and IHC to identify model systems with CDH19 expression similar to human tumors based on the number of CDH19 receptors present on the cell surface.

[0103] FIG. 6:

[0104] FACS analysis of CDH19/CD3 bispecific antibodies on indicated cell lines:

[0105] 1) untransfected L1.2. 2) L1.2 cells stably transfected with human CDH19, 3) melanoma cell line CHL-1, 4) melanoma cell line A2058, 5) human CD3 positive human T cell line HBP-ALL, 6) macaque T cell line 4119 LnPx. Negative controls [1) to 6)]: detection antibodies without prior CDH19/CD3 bispecific antibody.

[0106] FIG. 7:

[0107] Cytotoxic activity of CDH19/CD3 bispecific antibodies as measured in a 48-hour FACS-based cytotoxicity assay. Effector cells: unstimulated human PBMC. Target cells: as indicated. Effector to target cell (E:T)-ratio: 10:1.

[0108] FIG. 8:

[0109] Tumor growth in vivo inhibition of Colo699 cells by administration of CDH19 BiTE 2G6. The bispecific antibody construct inhibits growth of tumors at 0.5 mg/kg dose.

[0110] FIG. 9:

[0111] Tumor growth in vivo inhibition of CHL-1 cells by administration of CDH19 BiTE 2G6. The bispecific antibody construct inhibits growth of tumors at 0.5 mg/kg dose.

### DETAILED DESCRIPTION OF THE INVENTION

### Definitions

[0112] It must be noted that as used herein, the singular forms “a”, “an”, and “the”, include plural references unless the context clearly indicates otherwise. Thus, for example, reference to “a reagent” includes one or more of such different reagents and reference to “the method” includes reference to equivalent steps and methods known to those of ordinary skill in the art that could be modified or substituted for the methods described herein.

[0113] Unless otherwise indicated, the term “at least” preceding a series of elements is to be understood to refer to every element in the series. Those skilled in the art will recognize, or be able to ascertain using no more than routine experimentation, many equivalents to the specific embodiments of the invention described herein. Such equivalents are intended to be encompassed by the present invention.

[0114] The term “and/or” wherever used herein includes the meaning of “and”, “or” and “all or any other combination of the elements connected by said term”.

[0115] The term “about” or “approximately” as used herein means within ±20%, preferably within ±15%, more preferably within ±10%, and most preferably within ±5% of a given value or range.

[0116] Throughout this specification and the claims which follow, unless the context requires otherwise, the word “comprise”, and variations such as “comprises” and “comprising”, will be understood to imply the inclusion of a stated integer or step or group of integers or steps but not the exclusion of any other integer or step or group of integer or step. When used herein the term “comprising” can be substituted with the term “containing” or “including” or sometimes when used herein with the term “having”.

[0117] When used herein “consisting of” excludes any element, step, or ingredient not specified in the claim element. When used herein, “consisting essentially of” does not exclude materials or steps that do not materially affect the basic and novel characteristics of the claim.

[0118] In each instance herein any of the terms “comprising”, “consisting essentially of” and “consisting of” may be replaced with either of the other two terms.

[0119] The definition of the term “antibody” includes embodiments such as monoclonal, chimeric, single chain, humanized and human antibodies, as well as antibody fragments, like, inter alia, Fab fragments. Antibody fragments or derivatives further comprise F(ab′)₂, Fv, scFv fragments or single domain antibodies such as domain antibodies or nanobodies, single variable domain antibodies or immunoglobulin single variable domain comprising merely one variable domain, which might be VHH, VH or VL, that specifically bind an antigen or epitope independently of other V regions or domains; see, for example, Harlow and Lane (1988) and (1999), loc. cit.; Kontermann and Dübel, Antibody Engineering, Springer, 2nd ed. 2010 and Little, Recombinant Antibodies for Immunotherapy, Cambridge University Press 2009. Such immunoglobulin single variable domain encompasses not only an isolated antibody single variable domain polypeptide, but also larger polypeptides that comprise one or more monomers of an antibody single variable domain polypeptide sequence.

[0120] In line with this definition all above described embodiments of the term antibody can be subsumed under the term “antibody construct”. Said term also includes diabodies or Dual-Affinity Re-Targeting (DART) antibodies. Further envisaged are (bispecific) single chain diabodies, tandem diabodies (Tandab's), “minibodies” exemplified by a structure which is as follows: (VH-VL-CH3)₂, (scFv-CH3)₂ or (scFv-CH3-scFv)₂, “Fc DART” antibodies and “IgG DART” antibodies, and multibodies such as triabodies. Immunoglobulin single variable domains encompass not only an isolated antibody single variable domain polypeptide, but also larger polypeptides that comprise one or more monomers of an antibody single variable domain polypeptide sequence.

[0121] Various procedures are known in the art and may be used for the production of such antibody constructs (antibodies and/or fragments). Thus, (antibody) derivatives can be produced by peptidomimetics. Further, techniques described for the production of single chain antibodies (see, inter alia, U.S. Pat. No. 4,946,778, Kontermann and Dübel (2010), loc. cit. and Little (2009), loc. cit.) can be adapted to produce single chain antibodies specific for elected polypeptide(s). Also, transgenic animals may be used to express humanized antibodies specific for polypeptides and fusion proteins of this invention. For the preparation of monoclonal antibodies, any technique, providing antibodies produced by continuous cell line cultures can be used. Examples for such techniques include the hybridoma technique (Köhler and Milstein Nature 256 (1975), 495-497), the trioma technique, the human B-cell hybridoma technique (Kozbor, Immunology Today 4 (1983), 72) and the EBV-hybridoma technique to produce human monoclonal antibodies (Cole et al., Monoclonal Antibodies and Cancer Therapy, Alan R. Liss, Inc. (1985), 77-96). Surface plasmon resonance as employed in the BIAcore system can be used to increase the efficiency of phage antibodies which bind to an epitope of a target polypeptide, such as CD3 epsilon (Schier, Human Antibodies Hybridomas 7 (1996), 97-105; Malmborg, J. Immunol. Methods 183 (1995), 7-13). It is also envisaged in the context of this invention that the term “antibody” comprises antibody constructs, which may be expressed in a host as described herein below, e.g. antibody constructs which may be transfected and/or transduced via, inter alia, viruses or plasmid vectors.

[0122] Furthermore, the term “antibody” as employed in the invention also relates to derivatives or variants of the antibodies described herein which display the same specificity as the described antibodies.

[0123] The terms “antigen-binding domain”, “antigen-binding fragment” and “antibody binding region” when used herein refer to a part of an antibody molecule that comprises amino acids responsible for the specific binding between antibody and antigen. The part of the antigen that is specifically recognized and bound by the antibody is referred to as the “epitope” as described herein above. As mentioned above, an antigen-binding domain may typically comprise an antibody light chain variable region (VL) and an antibody heavy chain variable region (VH); however, it does not have to comprise both. Fd fragments, for example, have two VH regions and often retain some antigen-binding function of the intact antigen-binding domain. Examples of antigen-binding fragments of an antibody include (1) a Fab fragment, a monovalent fragment having the VL, VH, CL and CH1 domains; (2) a F(ab′)2 fragment, a bivalent fragment having two Fab fragments linked by a disulfide bridge at the hinge region; (3) a Fd fragment having the two VH and CH1 domains; (4) a Fv fragment having the VL and VH domains of a single arm of an antibody, (5) a dAb fragment (Ward et al., (1989) Nature 341:544-546), which has a VH domain; (6) an isolated complementarity determining region (CDR), and (7) a single chain Fv (scFv). Although the two domains of the Fv fragment, VL and VH are coded for by separate genes, they can be joined, using recombinant methods, by a synthetic linker that enables them to be made as a single protein chain in which the VL and VH regions pair to form monovalent molecules (known as single chain Fv (scFv); see e.g., Huston et al. (1988) Proc. Natl. Acad. Sci. USA 85:5879-5883). These antibody fragments are obtained using conventional techniques known to those with skill in the art, and the fragments are evaluated for function in the same manner as are intact antibodies.

[0124] The term “monoclonal antibody” as used herein refers to an antibody obtained from a population of substantially homogeneous antibodies, i.e., the individual antibodies comprising the population are identical except for possible naturally occurring mutations and/or post-translation modifications (e.g., isomerizations, amidations) that may be present in minor amounts. Monoclonal antibodies are highly specific, being directed against a single antigenic site. Furthermore, in contrast to conventional (polyclonal) antibody preparations which typically include different antibodies directed against different determinants (epitopes), each monoclonal antibody is directed against a single determinant on the antigen. In addition to their specificity, the monoclonal antibodies are advantageous in that they are synthesized by the hybridoma culture, uncontaminated by other immunoglobulins. The modifier “monoclonal” indicates the character of the antibody as being obtained from a substantially homogeneous population of antibodies, and is not to be construed as requiring production of the antibody by any particular method. For example, the monoclonal antibodies to be used in accordance with the present invention may be made by the hybridoma method first described by Kohler et al., Nature, 256: 495 (1975), or may be made by recombinant DNA methods (see, e.g., U.S. Pat. No. 4,816,567). The “monoclonal antibodies” may also be isolated from phage antibody libraries using the techniques described in Clackson et al., Nature, 352: 624-628 (1991) and Marks et al., J. Mol. Biol., 222: 581-597 (1991), for example.

[0125] The term “human antibody” includes antibodies having variable and constant regions corresponding substantially to human germline immunoglobulin sequences known in the art, including, for example, those described by Kabat et al. (See Kabat et al. (1991) loc. cit.). The human antibodies of the invention may include amino acid residues not encoded by human germline immunoglobulin sequences (e.g., mutations introduced by random or site-specific mutagenesis in vitro or by somatic mutation in vivo), for example in the CDRs, and in particular, CDR3. The human antibody can have at least one, two, three, four, five, or more positions replaced with an amino acid residue that is not encoded by the human germline immunoglobulin sequence. It is emphasized that the definition of human antibodies as used herein also contemplates fully human antibodies, which include only non-artificially and/or genetically altered human sequences of antibodies as those can be derived by using technologies using systems such as the Xenomice.

[0126] Examples of “antibody variants” include humanized variants of non-human antibodies, “affinity matured” antibodies (see, e.g. Hawkins et al. J. Mol. Biol. 254, 889-896 (1992) and Lowman et al., Biochemistry 30, 10832-10837 (1991)) and antibody mutants with altered effector function (s) (see, e.g., U.S. Pat. No. 5,648,260, Kontermann and Dübel (2010), loc. cit. and Little (2009), loc. cit.).

[0127] As used herein, “in vitro generated antibody” refers to an antibody where all or part of the variable region (e.g., at least one CDR) is generated in a non-immune cell selection (e.g., an in vitro phage display, protein chip or any other method in which candidate sequences can be tested for their ability to bind to an antigen). This term thus preferably excludes sequences generated by genomic rearrangement in an immune cell.

[0128] The pairing of a VH and VL together forms a single antigen-binding site. The CH domain most proximal to VH is designated as CH1. Each L chain is linked to an H chain by one covalent disulfide bond, while the two H chains are linked to each other by one or more disulfide bonds depending on the H chain isotype. The VH and VL domains consist of four regions of relatively conserved sequences called framework regions (FR1, FR2, FR3, and FR4), which form a scaffold for three regions of hypervariable sequences (complementarity determining regions, CDRs). The CDRs contain most of the residues responsible for specific interactions of the antibody with the antigen. CDRs are referred to as CDR 1, CDR2, and CDR3. Accordingly, CDR constituents on the heavy chain are referred to as H1, H2, and H3, while CDR constituents on the light chain are referred to as L1, L2, and L3.

[0129] The term “variable” refers to the portions of the immunoglobulin domains that exhibit variability in their sequence and that are involved in determining the specificity and binding affinity of a particular antibody (i.e., the “variable domain(s)”). Variability is not evenly distributed throughout the variable domains of antibodies; it is concentrated in sub-domains of each of the heavy and light chain variable regions. These sub-domains are called “hypervariable” regions or “complementarity determining regions” (CDRs). The more conserved (i.e., non-hypervariable) portions of the variable domains are called the “framework” regions (FRM). The variable domains of naturally occurring heavy and light chains each comprise four FRM regions, largely adopting a β-sheet configuration, connected by three hypervariable regions, which form loops connecting, and in some cases forming part of, the β-sheet structure. The hypervariable regions in each chain are held together in close proximity by the FRM and, with the hypervariable regions from the other chain, contribute to the formation of the antigen-binding site (see Kabat et al., loc. cit.). The constant domains are not directly involved in antigen binding, but exhibit various effector functions, such as, for example, antibody-dependent, cell-mediated cytotoxicity and complement activation.

[0130] The terms “CDR”, and its plural “CDRs”, refer to a complementarity determining region (CDR) of which three make up the binding character of a light chain variable region (CDRL1, CDRL2 and CDRL3) and three make up the binding character of a heavy chain variable region (CDRH1, CDRH2 and CDRH3). CDRs contribute to the functional activity of an antibody molecule and are separated by amino acid sequences that comprise scaffolding or framework regions. The exact definitional CDR boundaries and lengths are subject to different classification and numbering systems. CDRs may therefore be referred to by Kabat, Chothia, contact or any other boundary definitions, including the numbering system described herein. Despite differing boundaries, each of these systems has some degree of overlap in what constitutes the so called “hypervariable regions” within the variable sequences. CDR definitions according to these systems may therefore differ in length and boundary areas with respect to the adjacent framework region. See for example Kabat, Chothia, and/or MacCallum (Kabat et al., loc. cit.; Chothia et al., J. Mol. Biol, 1987, 196: 901; and MacCallum et al., J. Mol. Biol, 1996, 262: 732). However, the numbering in accordance with the so-called Kabat system is preferred. The CDR3 of the light chain and, particularly, CDR3 of the heavy chain may constitute the most important determinants in antigen binding within the light and heavy chain variable regions. In some antibody constructs, the heavy chain CDR3 appears to constitute the major area of contact between the antigen and the antibody. In vitro selection schemes in which CDR3 alone is varied can be used to vary the binding properties of an antibody or determine which residues contribute to the binding of an antigen.

[0131] “Consisting essentially of” means that the amino acid sequence can vary by about 1, 2, 3, 4, 5, 6, 7, 8, 9, 10, 11, 12, 13, 14, or 15% relative to the recited SEQ ID NO: sequence and still retain biological activity, as described herein.

[0132] In some embodiments, the antibody constructs of the invention are isolated proteins or substantially pure proteins. An “isolated” protein is unaccompanied by at least some of the material with which it is normally associated in its natural state, for example constituting at least about 5%, or at least about 50% by weight of the total protein in a given sample. It is understood that the isolated protein may constitute from 5 to 99.9% by weight of the total protein content depending on the circumstances. For example, the protein may be made at a significantly higher concentration through the use of an inducible promoter or high expression promoter, such that the protein is made at increased concentration levels. The definition includes the production of an antigen binding protein in a wide variety of organisms and/or host cells that are known in the art.

[0133] For amino acid sequences, sequence identity and/or similarity is determined by using standard techniques known in the art, including, but not limited to, the local sequence identity algorithm of Smith and Waterman, 1981, Adv. Appl. Math. 2:482, the sequence identity alignment algorithm of Needleman and Wunsch, 1970, J. Mol. Biol. 48:443, the search for similarity method of Pearson and Lipman, 1988, Proc. Nat. Acad. Sci. U.S.A. 85:2444, computerized implementations of these algorithms (GAP, BESTFIT, FASTA, and TFASTA in the Wisconsin Genetics Software Package, Genetics Computer Group, 575 Science Drive, Madison, Wis.), the Best Fit sequence program described by Devereux et al., 1984, Nucl. Acid Res. 12:387-395, preferably using the default settings, or by inspection. Preferably, percent identity is calculated by FastDB based upon the following parameters: mismatch penalty of 1; gap penalty of 1; gap size penalty of 0.33; and joining penalty of 30, “Current Methods in Sequence Comparison and Analysis,” Macromolecule Sequencing and Synthesis, Selected Methods and Applications, pp 127-149 (1988), Alan R. Liss, Inc.

[0134] An example of a useful algorithm is PILEUP. PILEUP creates a multiple sequence alignment from a group of related sequences using progressive, pairwise alignments. It can also plot a tree showing the clustering relationships used to create the alignment. PILEUP uses a simplification of the progressive alignment method of Feng & Doolittle, 1987, J. Mol. Evol. 35:351-360; the method is similar to that described by Higgins and Sharp, 1989, CABIOS 5:151-153. Useful PILEUP parameters including a default gap weight of 3.00, a default gap length weight of 0.10, and weighted end gaps.

[0135] Another example of a useful algorithm is the BLAST algorithm, described in: Altschul et al., 1990, J. Mol. Biol. 215:403-410; Altschul et al., 1997, Nucleic Acids Res. 25:3389-3402; and Karin et al., 1993, Proc. Natl. Acad. Sci. U.S.A. 90:5873-5787. A particularly useful BLAST program is the WU-BLAST-2 program which was obtained from Altschul et al., 1996, Methods in Enzymology 266:460-480. WU-BLAST-2 uses several search parameters, most of which are set to the default values. The adjustable parameters are set with the following values: overlap span=1, overlap fraction=0.125, word threshold (T)=II. The HSP S and HSP S2 parameters are dynamic values and are established by the program itself depending upon the composition of the particular sequence and composition of the particular database against which the sequence of interest is being searched; however, the values may be adjusted to increase sensitivity.

[0136] An additional useful algorithm is gapped BLAST as reported by Altschul et al., 1993, Nucl. Acids Res. 25:3389-3402. Gapped BLAST uses BLOSUM-62 substitution scores; threshold T parameter set to 9; the two-hit method to trigger ungapped extensions, charges gap lengths of k a cost of 10+k; Xu set to 16, and Xg set to 40 for database search stage and to 67 for the output stage of the algorithms. Gapped alignments are triggered by a score corresponding to about 22 bits.

[0137] Generally, the amino acid homology, similarity, or identity between individual variant CDRs are at least 80% to the sequences depicted herein, and more typically with preferably increasing homologies or identities of at least 85%, 90%, 91%, 92%, 93%, 94%, 95%, 96%, 97%, 98%, 99%, and almost 100%. In a similar manner, “percent (%) nucleic acid sequence identity” with respect to the nucleic acid sequence of the binding proteins identified herein is defined as the percentage of nucleotide residues in a candidate sequence that are identical with the nucleotide residues in the coding sequence of the antigen binding protein. A specific method utilizes the BLASTN module of WU-BLAST-2 set to the default parameters, with overlap span and overlap fraction set to 1 and 0.125, respectively.

[0138] Generally, the nucleic acid sequence homology, similarity, or identity between the nucleotide sequences encoding individual variant CDRs and the nucleotide sequences depicted herein are at least 80%, and more typically with preferably increasing homologies or identities of at least 80%, 81%, 82%, 83%, 84%, 85%, 86%, 87%, 88%, 89%, 90%, 91%, 92%, 93%, 94%, 95%, 96%, 97%, 98%, or 99%, and almost 100%.

[0139] Thus, a “variant CDR” is one with the specified homology, similarity, or identity to the parent CDR of the invention, and shares biological function, including, but not limited to, at least 80%, 81%, 82%, 83%, 84%, 85%, 86%, 87%, 88%, 89%, 90%, 91%, 92%, 93%, 94%, 95%, 96%, 97%, 98%, or 99% of the specificity and/or activity of the parent CDR.

[0140] While the site or region for introducing an amino acid sequence variation is predetermined, the mutation per se need not be predetermined. For example, in order to optimize the performance of a mutation at a given site, random mutagenesis may be conducted at the target codon or region and the expressed antigen binding protein CDR variants screened for the optimal combination of desired activity. Techniques for making substitution mutations at predetermined sites in DNA having a known sequence are well known, for example, M13 primer mutagenesis and PCR mutagenesis. Screening of the mutants is done using assays of antigen binding protein activities, such as CDH19 binding.

[0141] The term “amino acid” or “amino acid residue” typically refers to an amino acid having its art recognized definition such as an amino acid selected from the group consisting of: alanine (Ala or A); arginine (Arg or R); asparagine (Asn or N); aspartic acid (Asp or D); cysteine (Cys or C); glutamine (Gln or Q); glutamic acid (Glu or E); glycine (Gly or G); histidine (H is or H); isoleucine (He or I): leucine (Leu or L); lysine (Lys or K); methionine (Met or M); phenylalanine (Phe or F); pro line (Pro or P); serine (Ser or S); threonine (Thr or T); tryptophan (Trp or W); tyrosine (Tyr or Y); and valine (Val or V), although modified, synthetic, or rare amino acids may be used as desired. Generally, amino acids can be grouped as having a nonpolar side chain (e.g., Ala, Cys, He, Leu, Met, Phe, Pro, Val); a negatively charged side chain (e.g., Asp, Glu); a positively charged sidechain (e.g., Arg, His, Lys); or an uncharged polar side chain (e.g., Asn, Cys, Gln, Gly, His, Met, Phe, Ser, Thr, Trp, and Tyr).

[0142] The term “hypervariable region” (also known as “complementarity determining regions” or CDRs) when used herein refers to the amino acid residues of an antibody which are (usually three or four short regions of extreme sequence variability) within the V-region domain of an immunoglobulin which form the antigen-binding site and are the main determinants of antigen specificity. There are at least two methods for identifying the CDR residues: (1) An approach based on cross-species sequence variability (i.e., Kabat et al., loc. cit.); and (2) An approach based on crystallographic studies of antigen-antibody complexes (Chothia, C. et al., J. Mol. Biol. 196: 901-917 (1987)). However, to the extent that two residue identification techniques define regions of overlapping, but not identical regions, they can be combined to define a hybrid CDR. However, in general, the CDR residues are preferably identified in accordance with the so-called Kabat (numbering) system.

[0143] The term “framework region” refers to the art-recognized portions of an antibody variable region that exist between the more divergent (i.e., hypervariable) CDRs. Such framework regions are typically referred to as frameworks 1 through 4 (FR1, FR2, FR3, and FR4) and provide a scaffold for the presentation of the six CDRs (three from the heavy chain and three from the light chain) in three dimensional space, to form an antigen-binding surface.

[0144] Typically, CDRs form a loop structure that can be classified as a canonical structure. The term “canonical structure” refers to the main chain conformation that is adopted by the antigen binding (CDR) loops. From comparative structural studies, it has been found that five of the six antigen binding loops have only a limited repertoire of available conformations. Each canonical structure can be characterized by the torsion angles of the polypeptide backbone. Correspondent loops between antibodies may, therefore, have very similar three dimensional structures, despite high amino acid sequence variability in most parts of the loops (Chothia and Lesk, J. Mol. Biol., 1987, 196: 901; Chothia et al., Nature, 1989, 342: 877; Martin and Thornton, J. Mol. Biol, 1996, 263: 800, each of which is incorporated by reference in its entirety). Furthermore, there is a relationship between the adopted loop structure and the amino acid sequences surrounding it. The conformation of a particular canonical class is determined by the length of the loop and the amino acid residues residing at key positions within the loop, as well as within the conserved framework (i.e., outside of the loop). Assignment to a particular canonical class can therefore be made based on the presence of these key amino acid residues. The term “canonical structure” may also include considerations as to the linear sequence of the antibody, for example, as catalogued by Kabat (Kabat et al., loc. cit.). The Kabat numbering scheme (system) is a widely adopted standard for numbering the amino acid residues of an antibody variable domain in a consistent manner and is the preferred scheme applied in the present invention as also mentioned elsewhere herein. Additional structural considerations can also be used to determine the canonical structure of an antibody. For example, those differences not fully reflected by Kabat numbering can be described by the numbering system of Chothia et al and/or revealed by other techniques, for example, crystallography and two or three-dimensional computational modeling. Accordingly, a given antibody sequence may be placed into a canonical class which allows for, among other things, identifying appropriate chassis sequences (e.g., based on a desire to include a variety of canonical structures in a library). Kabat numbering of antibody amino acid sequences and structural considerations as described by Chothia et al., loc. cit. and their implications for construing canonical aspects of antibody structure, are described in the literature.

[0145] CDR3 is typically the greatest source of molecular diversity within the antibody-binding site. H3, for example, can be as short as two amino acid residues or greater than 26 amino acids. The subunit structures and three-dimensional configurations of different classes of immunoglobulins are well known in the art. For a review of the antibody structure, see Antibodies: A Laboratory Manual, Cold Spring Harbor Laboratory, eds. Harlow et al., 1988. One of skill in the art will recognize that each subunit structure, e.g., a CH, VH, CL, VL, CDR, FR structure, comprises active fragments, e.g., the portion of the VH, VL, or CDR subunit the binds to the antigen, i.e., the antigen-binding fragment, or, e.g., the portion of the CH subunit that binds to and/or activates, e.g., an Fc receptor and/or complement. The CDRs typically refer to the Kabat CDRs, as described in Sequences of Proteins of immunological Interest, US Department of Health and Human Services (1991), eds. Kabat et al. Another standard for characterizing the antigen binding site is to refer to the hypervariable loops as described by Chothia. See, e.g., Chothia, et al. (1987; J. Mol. Biol. 227:799-817); and Tomlinson et al. (1995) EMBO J. 14: 4628-4638. Still another standard is the AbM definition used by Oxford Molecular's AbM antibody modeling software. See, generally, e.g., Protein Sequence and Structure Analysis of Antibody Variable Domains. In: Antibody Engineering Lab Manual (Ed.: Duebel, S, and Kontermann, R., Springer-Verlag, Heidelberg). Embodiments described with respect to Kabat CDRs can alternatively be implemented using similar described relationships with respect to Chothia hypervariable loops or to the AbM-defined loops.

[0146] The sequence of antibody genes after assembly and somatic mutation is highly varied, and these varied genes are estimated to encode 10¹⁰ different antibody molecules (Immunoglobulin Genes, 2^{nd} ed., eds. Jonio et al., Academic Press, San Diego, Calif., 1995). Accordingly, the immune system provides a repertoire of immunoglobulins. The term “repertoire” refers to at least one nucleotide sequence derived wholly or partially from at least one sequence encoding at least one immunoglobulin. The sequence(s) may be generated by rearrangement in vivo of the V, D, and J segments of heavy chains, and the V and J segments of light chains. Alternatively, the sequence(s) can be generated from a cell in response to which rearrangement occurs, e.g., in vitro stimulation. Alternatively, part or all of the sequence(s) may be obtained by DNA splicing, nucleotide synthesis, mutagenesis, and other methods, see, e.g., U.S. Pat. No. 5,565,332. A repertoire may include only one sequence or may include a plurality of sequences, including ones in a genetically diverse collection.

[0147] The term “binding molecule” or “antibody construct” in the sense of the present disclosure indicates any molecule capable of (specifically) binding to, interacting with or recognizing the target molecules CDH19 and CD3. Such molecules or constructs may include proteinaceous parts and non-proteinaceous parts (e.g. chemical linkers or chemical cross-linking agents such as glutaraldehyde).

[0148] In the event that a linker is used, this linker is preferably of a length and sequence sufficient to ensure that each of the first and second domains can, independently from one another, retain their differential binding specificities. Most preferably and as documented in the appended examples, the antibody construct of the invention is a “bispecific single chain antibody construct”, more prefereably a bispecific single chain Fv (scFv). Bispecific single chain molecules are known in the art and are described in WO 99/54440, Mack, J. Immunol. (1997), 158, 3965-3970, Mack, PNAS, (1995), 92, 7021-7025, Kufer, Cancer Immunol. Immunother., (1997), 45, 193-197, Löffler, Blood, (2000), 95, 6, 2098-2103, Brühl, Immunol., (2001), 166, 2420-2426, Kipriyanov, J. Mol. Biol., (1999), 293, 41-56.

[0149] The said variable domains comprised in the herein described antibody constructs may be connected by additional linker sequences. The term “peptide linker” defines in accordance with the present invention an amino acid sequence by which the amino acid sequences of the first domain and the second domain of the antibody construct of the invention are linked with each other. An essential technical feature of such peptide linker is that said peptide linker does not comprise any polymerization activity. Among the suitable peptide linkers are those described in U.S. Pat. Nos. 4,751,180 and 4,935,233 or WO 88/09344. A preferred embodiment of a peptide linker is characterized by the amino acid sequence Gly-Gly-Gly-Gly-Ser, i.e. Gly₄Ser, or polymers thereof, i.e. (Gly₄Ser)ₓ, where x is an integer 1 or greater. The characteristics of said peptide linker, which comprise the absence of the promotion of secondary structures are known in the art and described e.g. in Dall'Acqua et al. (Biochem. (1998) 37, 9266-9273), Cheadle et al. (Mol Immunol (1992) 29, 21-30) and Raag and Whitlow (FASEB (1995) 9(1), 73-80). Peptide linkers which also do not promote any secondary structures are preferred. The linkage of said domains to each other can be provided by, e.g. genetic engineering, as described in the examples. Methods for preparing fused and operatively linked bispecific single chain constructs and expressing them in mammalian cells or bacteria are well-known in the art (e.g. WO 99/54440 or Sambrook et al., Molecular Cloning: A Laboratory Manual, Cold Spring Harbor Laboratory Press, Cold Spring Harbor, N.Y., 2001).

[0150] For peptide linkers, which connect the at least two binding domains in the antibody construct of the invention peptide linkers are preferred which comprise only a few number of amino acid residues, e.g. 12 amino acid residues or less. Thus, peptide linker of 12, 11, 10, 9, 8, 7, 6 or 5 amino acid residues are preferred. An envisaged peptide linker with less than 5 amino acids comprises 4, 3, 2 or one amino acid(s) wherein Gly-rich linkers are preferred. A particularly preferred “single” amino acid in context of said “peptide linker” is Gly. Accordingly, said peptide linker may consist of the single amino acid Gly.

[0151] The term “multispecific” as used herein refers to a binding molecule which is an antibody construct and comprises at least a first and a second binding domain, wherein the first binding domain is capable of binding to one antigen or target, and the second binding domain is capable of binding to another antigen or target. Accordingly, antibody constructs according to the invention comprise at least specificities for two different antigens or targets and are at least bispecific. The “antibody construct” of the invention also comprises multispecific binding molecules such as e.g. trispecific binding molecules, the latter ones including three binding domains.

[0152] It is also envisaged that the antibody construct of the invention has, in addition to its function to bind to the target molecules CDH19 and CD3, a further function. In this format, the antibody construct is a tri- or multifunctional antibody construct by targeting plasma cells through binding to CDH19, mediating cytotoxic T cell activity through CD3 binding and providing a further function such as a fully functional Fc constant domain mediating antibody-dependent cellular cytotoxicity through recruitment of effector cells like NK cells, a label (fluorescent etc.), a therapeutic agent such as, e.g. a toxin or radionuclide, and/or means to enhance serum half-life, etc.

[0153] The term “binding domain” characterizes in connection with the present invention a domain which is capable of specifically binding to/interacting with a given target epitope or a given target site on the target molecules CDH19 and CD3.

[0154] Binding domains can be derived from a binding domain donor such as for example an antibody. It is envisaged that a binding domain of the present invention comprises at least said part of any of the aforementioned binding domains that is required for binding to/interacting with a given target epitope or a given target site on the target molecules CDH19 and CD3.

[0155] It is envisaged that the binding domain of the aforementioned binding domain donors is characterized by that part of these donors that is responsible for binding the respective target, i.e. when that part is removed from the binding domain donor, said donor loses its binding capability. “Loses” means a reduction of at least 50% of the binding capability when compared with the binding donor. Methods to map these binding sites are well known in the art—it is therefore within the standard knowledge of the skilled person to locate/map the binding site of a binding domain donor and, thereby, to “derive” said binding domain from the respective binding domain donors.

[0156] The term “epitope” refers to a site on an antigen to which a binding domain, such as an antibody or immunoglobulin or derivative or fragment of an antibody or of an immunoglobulin, specifically binds. An “epitope” is antigenic and thus the term epitope is sometimes also referred to herein as “antigenic structure” or “antigenic determinant”. Thus, the binding domain is an “antigen-interaction-site”. Said binding/interaction is also understood to define a “specific recognition”. In one example, said binding domain which (specifically) binds to/interacts with a given target epitope or a given target site on the target molecules CDH19 and CD3 is an antibody or immunoglobulin, and said binding domain is a VH and/or VL region of an antibody or of an immunoglobulin.

[0157] “Epitopes” can be formed both by contiguous amino acids or non-contiguous amino acids juxtaposed by tertiary folding of a protein. A “linear epitope” is an epitope where an amino acid primary sequence comprises the recognized epitope. A linear epitope typically includes at least 3 or at least 4, and more usually, at least 5 or at least 6 or at least 7, for example, about 8 to about 10 amino acids in a unique sequence.

[0158] A “conformational epitope”, in contrast to a linear epitope, is an epitope wherein the primary sequence of the amino acids comprising the epitope is not the sole defining component of the epitope recognized (e.g., an epitope wherein the primary sequence of amino acids is not necessarily recognized by the binding domain). Typically a conformational epitope comprises an increased number of amino acids relative to a linear epitope. With regard to recognition of conformational epitopes, the binding domain recognizes a three-dimensional structure of the antigen, preferably a peptide or protein or fragment thereof (in the context of the present invention, the antigen for one of the binding domains is comprised within the CDH19 protein). For example, when a protein molecule folds to form a three-dimensional structure, certain amino acids and/or the polypeptide backbone forming the conformational epitope become juxtaposed enabling the antibody to recognize the epitope. Methods of determining the conformation of epitopes include, but are not limited to, x-ray crystallography, two-dimensional nuclear magnetic resonance (2D-NMR) spectroscopy and site-directed spin labelling and electron paramagnetic resonance (EPR) spectroscopy. Moreover, the provided examples describe a further method to characterize a given binding domain by way of binning, which includes a test whether the given binding domain binds to one or more epitope cluster(s) of a given protein, in particular CDH19.

[0159] As used herein, the term “epitope cluster” denotes the entirety of epitopes lying in a defined contiguous stretch of an antigen. An epitope cluster can comprise one, two or more epitopes. The concept of epitope cluster is also used in the characterization of the features of the antibody constructs of the invention.

[0160] The terms “(capable of) binding to”, “specifically recognizing”, “directed to” and “reacting with” mean in accordance with this invention that a binding domain is capable of specifically interacting with one or more, preferably at least two, more preferably at least three and most preferably at least four amino acids of an epitope.

[0161] As used herein, the terms “specifically interacting”, “specifically binding” or “specifically bind(s)” mean that a binding domain exhibits appreciable affinity for a particular protein or antigen and, generally, does not exhibit significant reactivity with proteins or antigens other than CDH19 or CD3. “Appreciable affinity” includes binding with an affinity of about 10⁻⁶M (KD) or stronger. Preferably, binding is considered specific when binding affinity is about 10⁻¹² to 10⁻⁸ M, 10⁻¹² to 10⁻⁹ M, 10⁻¹² to 10⁻¹⁹ M, 10⁻¹¹ to 10⁻⁸ M, preferably of about 10⁻¹¹ to 10⁻⁹M. Whether a binding domain specifically reacts with or binds to a target can be tested readily by, inter alia, comparing the reaction of said binding domain with a target protein or antigen with the reaction of said binding domain with proteins or antigens other than CDH19 or CD3. Preferably, a binding domain of the invention does not essentially bind or is not capable of binding to proteins or antigens other than CDH19 or CD3 (i.e. the first binding domain is not capable of binding to proteins other than CDH19 and the second binding domain is not capable of binding to proteins other than CD3).

[0162] The term “does not essentially bind”, or “is not capable of binding” means that a binding domain of the present invention does not bind another protein or antigen other than CDH19 or CD3, i.e., does not show reactivity of more than 30%, preferably not more than 20%, more preferably not more than 10%, particularly preferably not more than 9%, 8%, 7%, 6% or 5% with proteins or antigens other than CDH19 or CD3, whereby binding to CDH19 or CD3, respectively, is set to be 100%.

[0163] Specific binding is believed to be effected by specific motifs in the amino acid sequence of the binding domain and the antigen. Thus, binding is achieved as a result of their primary, secondary and/or tertiary structure as well as the result of secondary modifications of said structures. The specific interaction of the antigen-interaction-site with its specific antigen may result in a simple binding of said site to the antigen. Moreover, the specific interaction of the antigen-interaction-site with its specific antigen may alternatively or additionally result in the initiation of a signal, e.g. due to the induction of a change of the conformation of the antigen, an oligomerization of the antigen, etc.

[0164] Proteins (including fragments thereof, preferably biologically active fragments, and peptides, usually having less than 30 amino acids) comprise one or more amino acids coupled to each other via a covalent peptide bond (resulting in a chain of amino acids). The term “polypeptide” as used herein describes a group of molecules, which consist of more than 30 amino acids. Polypeptides may further form multimers such as dimers, trimers and higher oligomers, i.e. consisting of more than one polypeptide molecule. Polypeptide molecules forming such dimers, trimers etc. may be identical or non-identical. The corresponding higher order structures of such multimers are, consequently, termed homo- or heterodimers, homo- or heterotrimers etc. An example for a hereteromultimer is an antibody molecule, which, in its naturally occurring form, consists of two identical light polypeptide chains and two identical heavy polypeptide chains. The terms “polypeptide” and “protein” also refer to naturally modified polypeptides/proteins wherein the modification is effected e.g. by post-translational modifications like glycosylation, acetylation, phosphorylation and the like. A “polypeptide” when referred to herein may also be chemically modified such as pegylated. Such modifications are well known in the art.

[0165] “Isolated” when used to describe the antibody construct disclosed herein, means a antibody construct that has been identified, separated and/or recovered from a component of its production environment. Preferably, the isolated antibody construct is free of association with all other components from its production environment. Contaminant components of its production environment, such as that resulting from recombinant transfected cells, are materials that would typically interfere with diagnostic or therapeutic uses for the polypeptide, and may include enzymes, hormones, and other proteinaceous or non-proteinaceous solutes. In preferred embodiments, the antibody construct will be purified (1) to a degree sufficient to obtain at least 15 residues of N-terminal or internal amino acid sequence by use of a spinning cup sequenator, or (2) to homogeneity by SDS-PAGE under non-reducing or reducing conditions using Coomassie blue or, preferably, silver stain. Ordinarily, however, an isolated antibody will be prepared by at least one purification step.

[0166] Amino acid sequence modifications of the antibody constructs described herein are contemplated. For example, it may be desirable to improve the binding affinity and/or other biological properties of the antibody. Amino acid sequence variants of the antibody constructs are prepared by introducing appropriate nucleotide changes into the antibody constructs nucleic acid, or by peptide synthesis.

[0167] Such modifications include, for example, deletions from, and/or insertions into, and/or substitutions of, residues within the amino acid sequences of the antibody constructs. Any combination of deletion, insertion, and substitution is made to arrive at the final construct, provided that the final construct possesses the desired characteristics. The amino acid changes also may alter post-translational processes of the antibody constructs, such as changing the number or position of glycosylation sites. Preferably, 1, 2, 3, 4, 5, 6, 7, 8, 9, or amino acids may be substituted in a CDR, while 1, 2, 3, 4, 5, 6, 7, 8, 9, 10, 11, 12, 13, 14, 15, 16, 17, 18, 19, 20, or 25 amino acids may be substituted in the framework regions (FRs). The substitutions are preferably conservative substitutions as described herein. Additionally or alternatively, 1, 2, 3, 4, 5, or 6 amino acids may be inserted or deleted in each of the CDRs (of course, dependent on their length), while 1, 2, 3, 4, 5, 6, 7, 8, 9, 10, 11, 12, 13, 14, 15, 16, 17, 18, 19, 20, or 25 amino acids may be inserted or deleted in each of the FRs.

[0168] A useful method for identification of certain residues or regions of the antibody constructs that are preferred locations for mutagenesis is called “alanine scanning mutagenesis” as described by Cunningham and Wells in Science, 244: 1081-1085 (1989). Here, a residue or group of target residues within the antibody construct is/are identified (e.g. charged residues such as arg, asp, his, lys, and glu) and replaced by a neutral or negatively charged amino acid (most preferably alanine or polyalanine) to affect the interaction of the amino acids with the epitope.

[0169] Those amino acid locations demonstrating functional sensitivity to the substitutions then are refined by introducing further or other variants at, or for, the sites of substitution. Thus, while the site for introducing an amino acid sequence variation is predetermined, the nature of the mutation per se needs not to be predetermined. For example, to analyze the performance of a mutation at a given site, ala scanning or random mutagenesis is conducted at a target codon or region and the expressed antibody construct variants are screened for the desired activity.

[0170] Preferably, amino acid sequence insertions include amino- and/or carboxyl-terminal fusions ranging in length from 1, 2, 3, 4, 5, 6, 7, 8, 9 or 10 residues to polypeptides containing a hundred or more residues, as well as intrasequence insertions of single or multiple amino acid residues. An insertional variant of the antibody construct includes the fusion to the N- or C-terminus of the antibody to an enzyme or a fusion to a polypeptide which increases the serum half-life of the antibody.

[0171] Another type of variant is an amino acid substitution variant. These variants have preferably at least 1, 2, 3, 4, 5, 6, 7, 8, 9 or 10 amino acid residues in the antibody construct replaced by a different residue. The sites of greatest interest for substitutional mutagenesis include the CDRs of the heavy and/or light chain, in particular the hypervariable regions, but FR alterations in the heavy and/or light chain are also contemplated.

[0172] For example, if a CDR sequence encompasses 6 amino acids, it is envisaged that one, two or three of these amino acids are substituted. Similarly, if a CDR sequence encompasses 15 amino acids it is envisaged that one, two, three, four, five or six of these amino acids are substituted.

[0173] Generally, if amino acids are substituted in one or more or all of the CDRs of the heavy and/or light chain, it is preferred that the then-obtained “substituted” sequence is at least 60%, more preferably 65%, even more preferably 70%, particularly preferably 75%, more particularly preferably 80% identical to the “original” CDR sequence. This means that it is dependent of the length of the CDR to which degree it is identical to the “substituted” sequence. For example, a CDR having 5 amino acids is preferably 80% identical to its substituted sequence in order to have at least one amino acid substituted. Accordingly, the CDRs of the antibody construct may have different degrees of identity to their substituted sequences, e.g., CDRL1 may have 80%, while CDRL3 may have 90%.

[0174] Preferred substitutions (or replacements) are conservative substitutions. However, any substitution (including non-conservative substitution or one or more from the “exemplary substitutions” listed in Table 1, below) is envisaged as long as the antibody construct retains its capability to bind to CDH19 via the first binding domain and to CD3 epsilon via the second binding domain and/or its CDRs have an identity to the then substituted sequence (at least 60%, more preferably 65%, even more preferably 70%, particularly preferably 75%, more particularly preferably 80% identical to the “original” CDR sequence).

[0175] Conservative substitutions are shown in Table 1 under the heading of “preferred substitutions”. If such substitutions result in a change in biological activity, then more substantial changes, denominated “exemplary substitutions” in Table 1, or as further described below in reference to amino acid classes, may be introduced and the products screened for a desired characteristic.

TABLE 1
Amino Acid Substitutions

| Original | Exemplary Substitutions | Preferred Substitutions |
|---|---|---|
| Ala (A) | val, leu, ile | val |
| Arg (R) | lys, gln, asn | lys |
| Asn (N) | gln, his, asp, lys, arg | gln |
| Asp (D) | glu, asn | glu |
| Cys (C) | ser, ala | ser |
| Gln (Q) | asn, glu | asn |
| Glu (E) | asp, gln | asp |
| Gly (G) | ala | ala |
| His (H) | asn, gln, lys, arg | arg |
| Ile (I) | leu, val, met, ala, phe | leu |
| Leu (L) | norleucine, ile, val, met, ala | ile |
| Lys (K) | arg, gln, asn | arg |
| Met (M) | leu, phe, ile | leu |
| Phe (F) | leu, val, ile, ala, tyr | tyr |
| Pro (P) | ala | ala |
| Ser (S) | thr | thr |
| Thr (T) | ser | ser |
| Trp (W) | tyr, phe | tyr |
| Tyr (Y) | trp, phe, thr, ser | phe |
| Val (V) | ile, leu, met, phe, ala | leu |

[0176] Substantial modifications in the biological properties of the antibody construct of the present invention are accomplished by selecting substitutions that differ significantly in their effect on maintaining (a) the structure of the polypeptide backbone in the area of the substitution, for example, as a sheet or helical conformation, (b) the charge or hydrophobicity of the molecule at the target site, or (c) the bulk of the side chain. Naturally occurring residues are divided into groups based on common side-chain properties: (1) hydrophobic: norleucine, met, ala, val, leu, ile; (2) neutral hydrophilic: cys, ser, thr; (3) acidic: asp, glu; (4) basic: asn, gin, his, lys, arg; (5) residues that influence chain orientation: gly, pro; and (6) aromatic: trp, tyr, phe.

[0177] Non-conservative substitutions will entail exchanging a member of one of these classes for another class. Any cysteine residue not involved in maintaining the proper conformation of the antibody construct may be substituted, generally with serine, to improve the oxidative stability of the molecule and prevent aberrant crosslinking. Conversely, cysteine bond(s) may be added to the antibody to improve its stability (particularly where the antibody is an antibody fragment such as an Fv fragment).

[0178] A particularly preferred type of substitutional variant involves substituting one or more hypervariable region residues of a parent antibody (e.g. a humanized or human antibody). Generally, the resulting variant(s) selected for further development will have improved biological properties relative to the parent antibody from which they are generated. A convenient way for generating such substitutional variants involves affinity maturation using phage display. Briefly, several hypervariable region sites (e.g. 6-7 sites) are mutated to generate all possible amino acid substitutions at each site. The antibody variants thus generated are displayed in a monovalent fashion from filamentous phage particles as fusions to the gene III product of M13 packaged within each particle. The phage-displayed variants are then screened for their biological activity (e.g. binding affinity) as herein disclosed. In order to identify candidate hypervariable region sites for modification, alanine scanning mutagenesis can be performed to identify hypervariable region residues contributing significantly to antigen binding. Alternatively, or additionally, it may be beneficial to analyze a crystal structure of the antigen-antibody complex to identify contact points between the binding domain and, e.g., human CDH19. Such contact residues and neighbouring residues are candidates for substitution according to the techniques elaborated herein. Once such variants are generated, the panel of variants is subjected to screening as described herein and antibodies with superior properties in one or more relevant assays may be selected for further development.

[0179] Other modifications of the antibody construct are contemplated herein. For example, the antibody construct may be linked to one of a variety of non-proteinaceous polymers, e.g., polyethylene glycol, polypropylene glycol, polyoxyalkylenes, or copolymers of polyethylene glycol and polypropylene glycol. The antibody construct may also be entrapped in microcapsules prepared, for example, by coacervation techniques or by interfacial polymerization (for example, hydroxymethylcellulose or gelatine-microcapsules and poly (methylmethacylate) microcapsules, respectively), in colloidal drug delivery systems (for example, liposomes, albumin microspheres, microemulsions, nanoparticles and nanocapsules), or in macroemulsions. Such techniques are disclosed in Remington's Pharmaceutical Sciences, 16th edition, Oslo, A., Ed., (1980).

[0180] The antibody constructs disclosed herein may also be formulated as immuno-liposomes. A “liposome” is a small vesicle composed of various types of lipids, phospholipids and/or surfactant which is useful for delivery of a drug to a mammal. The components of the liposome are commonly arranged in a bilayer formation, similar to the lipid arrangement of biological membranes. Liposomes containing the antibody are prepared by methods known in the art, such as described in Epstein et al., Proc. Natl. Acad. Sci. USA, 82: 3688 (1985); Hwang et al., Proc. Natl. Acad. Sci. USA, 77: 4030 (1980); U.S. Pat. Nos. 4,485,045 and 4,544,545; and WO 97/38731 published Oct. 23, 1997. Liposomes with enhanced circulation time are disclosed in U.S. Pat. No. 5,013,556. Particularly useful liposomes can be generated by the reverse phase evaporation method with a lipid composition comprising phosphatidylcholine, cholesterol and PEG-derivatized phosphatidylethanolamine (PEG-PE). Liposomes are extruded through filters of defined pore size to yield liposomes with the desired diameter. Fab′ fragments of the antibody of the present invention can be conjugated to the liposomes as described in Martin et al. J. Biol. Chem. 257: 286-288 (1982) via a disulfide interchange reaction. A chemotherapeutic agent is optionally contained within the liposome. See Gabizon et al. J. National Cancer Inst. 81 (19) 1484 (1989).

[0181] When using recombinant techniques, the antibody construct can be produced intracellularly, in the periplasmic space, or directly secreted into the medium. If the antibody construct is produced intracellularly, as a first step, the particulate debris, either host cells or lysed fragments, are removed, for example, by centrifugation or ultrafiltration. Carter et al., Bio/Technology 10: 163-167 (1992) describe a procedure for isolating antibodies which are secreted to the periplasmic space of E. coli.

[0182] The antibody construct composition prepared from the cells can be purified using, for example, hydroxylapatite chromatography, gel electrophoresis, dialysis, and affinity chromatography, with affinity chromatography being the preferred purification technique.

[0183] The term “nucleic acid” is well known to the skilled person and encompasses DNA (such as cDNA) and RNA (such as mRNA). The nucleic acid can be double stranded and single stranded, linear and circular. Said nucleic acid molecule is preferably comprised in a vector which is preferably comprised in a host cell. Said host cell is, e.g. after transformation or transfection with the nucleic acid sequence of the invention, capable of expressing the antibody construct. For that purpose the nucleic acid molecule is operatively linked with control sequences.

[0184] A vector is a nucleic acid molecule used as a vehicle to transfer (foreign) genetic material into a cell. The term “vector” encompasses—but is not restricted to—plasmids, viruses, cosmids and artificial chromosomes. In general, engineered vectors comprise an origin of replication, a multicloning site and a selectable marker. The vector itself is generally a nucleotide sequence, commonly a DNA sequence, that comprises an insert (transgene) and a larger sequence that serves as the “backbone” of the vector. Modern vectors may encompass additional features besides the transgene insert and a backbone: promoter, genetic marker, antibiotic resistance, reporter gene, targeting sequence, protein purification tag. Vectors called expression vectors (expression constructs) specifically are for the expression of the transgene in the target cell, and generally have control sequences such as a promoter sequence that drives expression of the transgene. Insertion of a vector into the target cell is usually called “transformation” for bacteria, “transfection” for eukaryotic cells, although insertion of a viral vector is also called “transduction”.

[0185] As used herein, the term “host cell” is intended to refer to a cell into which a nucleic acid encoding the antibody construct of the invention is introduced by way of transformation, transfection and the like. It should be understood that such terms refer not only to the particular subject cell but to the progeny or potential progeny of such a cell. Because certain modifications may occur in succeeding generations due to either mutation or environmental influences, such progeny may not, in fact, be identical to the parent cell, but are still included within the scope of the term as used herein.

[0186] As used herein, the term “expression” includes any step involved in the production of a antibody construct of the invention including, but not limited to, transcription, post-transcriptional modification, translation, post-translational modification, and secretion.

[0187] The term “control sequences” refers to DNA sequences necessary for the expression of an operably linked coding sequence in a particular host organism. The control sequences that are suitable for prokaryotes, for example, include a promoter, optionally an operator sequence, and a ribosome binding site. Eukaryotic cells are known to utilize promoters, polyadenylation signals, and enhancers.

[0188] A nucleic acid is “operably linked” when it is placed into a functional relationship with another nucleic acid sequence. For example, DNA for a presequence or secretory leader is operably linked to DNA for a polypeptide if it is expressed as a preprotein that participates in the secretion of the polypeptide; a promoter or enhancer is operably linked to a coding sequence if it affects the transcription of the sequence; or a ribosome binding site is operably linked to a coding sequence if it is positioned so as to facilitate translation. Generally, “operably linked” means that the DNA sequences being linked are contiguous, and, in the case of a secretory leader, contiguous and in reading phase. However, enhancers do not have to be contiguous. Linking is accomplished by ligation at convenient restriction sites. If such sites do not exist, the synthetic oligonucleotide adaptors or linkers are used in accordance with conventional practice.

[0189] The terms “host cell,” “target cell” or “recipient cell” are intended to include any individual cell or cell culture that can be or has/have been recipients for vectors or the incorporation of exogenous nucleic acid molecules, polynucleotides and/or proteins. It also is intended to include progeny of a single cell, and the progeny may not necessarily be completely identical (in morphology or in genomic or total DNA complement) to the original parent cell due to natural, accidental, or deliberate mutation. The cells may be prokaryotic or eukaryotic, and include but are not limited to bacteria, yeast cells, animal cells, and mammalian cells, e.g., murine, rat, macaque or human.

[0190] Suitable host cells include prokaryotes and eukaryotic host cells including yeasts, fungi, insect cells and mammalian cells.

[0191] The antibody construct of the invention can be produced in bacteria. After expression, the antibody construct of the invention, preferably the antibody construct is isolated from the E. coli cell paste in a soluble fraction and can be purified through, e.g., affinity chromatography and/or size exclusion. Final purification can be carried out similar to the process for purifying antibody expressed e.g, in CHO cells.

[0192] In addition to prokaryotes, eukaryotic microbes such as filamentous fungi or yeast are suitable cloning or expression hosts for the antibody construct of the invention. Saccharomyces cerevisiae, or common baker's yeast, is the most commonly used among lower eukaryotic host microorganisms. However, a number of other genera, species, and strains are commonly available and useful herein, such as Schizosaccharomyces pombe, Kluyveromyces hosts such as, e.g., K. lactis, K. fragilis (ATCC 12424), K. bulgaricus (ATCC 16045), K. wickeramii (ATCC 24178), K. waltii (ATCC 56500), K. drosophilarum (ATCC 36906), K. thermotolerans, and K. marxianus; yarrowia (EP 402 226); Pichia pastoris (EP 183 070); Candida; Trichoderma reesia (EP 244 234); Neurospora crassa; Schwanniomyces such as Schwanniomyces occidentalis; and filamentous fungi such as, e.g., Neurospora, Penicillium, Tolypocladium, and Aspergillus hosts such as A. nidulans and A. niger.

[0193] Suitable host cells for the expression of glycosylated antibody construct of the invention, preferably antibody derived antibody constructs are derived from multicellular organisms. Examples of invertebrate cells include plant and insect cells. Numerous baculoviral strains and variants and corresponding permissive insect host cells from hosts such as Spodoptera frugiperda (caterpillar), Aedes aegypti (mosquito), Aedes albopictus (mosquito), Drosophila melanogaster (fruit fly), and Bombyx mori have been identified. A variety of viral strains for transfection are publicly available, e.g., the L-1 variant of Autographa californica NPV and the Bm-5 strain of Bombyx mori NPV, and such viruses may be used as the virus herein according to the present invention, particularly for transfection of Spodoptera frugiperda cells.

[0194] Plant cell cultures of cotton, corn, potato, soybean, petunia, tomato, Arabidopsis and tobacco can also be utilized as hosts. Cloning and expression vectors useful in the production of proteins in plant cell culture are known to those of skill in the art. See e.g. Hiatt et al., Nature (1989) 342: 76-78, Owen et al. (1992) Bio/Technology 10: 790-794, Artsaenko et al. (1995) The Plant J 8: 745-750, and Fecker et al. (1996) Plant Mol Biol 32: 979-986.

[0195] However, interest has been greatest in vertebrate cells, and propagation of vertebrate cells in culture (tissue culture) has become a routine procedure. Examples of useful mammalian host cell lines are monkey kidney CV1 line transformed by SV40 (COS-7, ATCC CRL 1651); human embryonic kidney line (293 or 293 cells subcloned for growth in suspension culture, Graham et al., J. Gen Virol. 36: 59 (1977)); baby hamster kidney cells (BHK, ATCC CCL 10); Chinese hamster ovary cells/−DHFR(CHO, Urlaub et al., Proc. Natl. Acad. Sci. USA 77: 4216 (1980)); mouse sertoli cells (TM4, Mather, Biol. Reprod. 23: 243-251 (1980)); monkey kidney cells (CV1 ATCC CCL 70); African green monkey kidney cells (VERO-76, ATCC CRL1587); human cervical carcinoma cells (HELA, ATCC CCL 2); canine kidney cells (MDCK, ATCC CCL 34); buffalo rat liver cells (BRL 3A, ATCC CRL 1442); human lung cells (W138, ATCC CCL 75); human liver cells (Hep G2,1413 8065); mouse mammary tumor (MMT 060562, ATCC CCL5 1); TR1 cells (Mather et al., Annals N.Y. Acad. Sci. 383: 44-68 (1982)); MRC 5 cells; FS4 cells; and a human hepatoma line (Hep G2).

[0196] When using recombinant techniques, the antibody construct of the invention can be produced intracellularly, in the periplasmic space, or directly secreted into the medium. If the antibody construct is produced intracellularly, as a first step, the particulate debris, either host cells or lysed fragments, are removed, for example, by centrifugation or ultrafiltration. Carter et al., Bio/Technology 10: 163-167 (1992) describe a procedure for isolating antibodies which are secreted to the periplasmic space of E. coli. Briefly, cell paste is thawed in the presence of sodium acetate (pH 3.5), EDTA, and phenylmethylsulfonylfluoride (PMSF) over about 30 min. Cell debris can be removed by centrifugation. Where the antibody is secreted into the medium, supernatants from such expression systems are generally first concentrated using a commercially available protein concentration filter, for example, an Amicon or Millipore Pellicon ultrafiltration unit. A protease inhibitor such as PMSF may be included in any of the foregoing steps to inhibit proteolysis and antibiotics may be included to prevent the growth of adventitious contaminants.

[0197] The antibody construct of the invention prepared from the host cells can be purified using, for example, hydroxylapatite chromatography, gel electrophoresis, dialysis, and affinity chromatography, with affinity chromatography being the preferred purification technique.

[0198] The matrix to which the affinity ligand is attached is most often agarose, but other matrices are available. Mechanically stable matrices such as controlled pore glass or poly (styrenedivinyl)benzene allow for faster flow rates and shorter processing times than can be achieved with agarose. Where the antibody construct of the invention comprises a CH3 domain, the Bakerbond ABXMresin (J. T. Baker, Phillipsburg, N.J.) is useful for purification. Other techniques for protein purification such as fractionation on an ion-exchange column, ethanol precipitation, Reverse Phase HPLC, chromatography on silica, chromatography on heparin SEPHAROSE™ chromatography on an anion or cation exchange resin (such as a polyaspartic acid column), chromato-focusing, SDS-PAGE, and ammonium sulfate precipitation are also available depending on the antibody to be recovered.

[0199] The term “culturing” refers to the in vitro maintenance, differentiation, growth, proliferation and/or propagation of cells under suitable conditions in a medium.

[0200] As used herein, the term “pharmaceutical composition” relates to a composition for administration to a patient, preferably a human patient. The particular preferred pharmaceutical composition of this invention comprises the antibody construct of the invention. Preferably, the pharmaceutical composition comprises suitable formulations of carriers, stabilizers and/or excipients. In a preferred embodiment, the pharmaceutical composition comprises a composition for parenteral, transdermal, intraluminal, intraarterial, intrathecal and/or intranasal administration or by direct injection into tissue. It is in particular envisaged that said composition is administered to a patient via infusion or injection. Administration of the suitable compositions may be effected by different ways, e.g., by intravenous, intraperitoneal, subcutaneous, intramuscular, topical or intradermal administration. In particular, the present invention provides for an uninterrupted administration of the suitable composition. As a non-limiting example, uninterrupted, i.e. continuous administration may be realized by a small pump system worn by the patient for metering the influx of therapeutic agent into the body of the patient. The pharmaceutical composition comprising the antibody construct of the invention can be administered by using said pump systems. Such pump systems are generally known in the art, and commonly rely on periodic exchange of cartridges containing the therapeutic agent to be infused. When exchanging the cartridge in such a pump system, a temporary interruption of the otherwise uninterrupted flow of therapeutic agent into the body of the patient may ensue. In such a case, the phase of administration prior to cartridge replacement and the phase of administration following cartridge replacement would still be considered within the meaning of the pharmaceutical means and methods of the invention together make up one “uninterrupted administration” of such therapeutic agent.

[0201] The continuous or uninterrupted administration of these antibody constructs of the invention may be intravenous or subcutaneous by way of a fluid delivery device or small pump system including a fluid driving mechanism for driving fluid out of a reservoir and an actuating mechanism for actuating the driving mechanism. Pump systems for subcutaneous administration may include a needle or a cannula for penetrating the skin of a patient and delivering the suitable composition into the patient's body. Said pump systems may be directly fixed or attached to the skin of the patient independently of a vein, artery or blood vessel, thereby allowing a direct contact between the pump system and the skin of the patient. The pump system can be attached to the skin of the patient for 24 hours up to several days. The pump system may be of small size with a reservoir for small volumes. As a non-limiting example, the volume of the reservoir for the suitable pharmaceutical composition to be administered can be between 0.1 and 50 ml.

[0202] The continuous administration may be transdermal by way of a patch worn on the skin and replaced at intervals. One of skill in the art is aware of patch systems for drug delivery suitable for this purpose. It is of note that transdermal administration is especially amenable to uninterrupted administration, as exchange of a first exhausted patch can advantageously be accomplished simultaneously with the placement of a new, second patch, for example on the surface of the skin immediately adjacent to the first exhausted patch and immediately prior to removal of the first exhausted patch. Issues of flow interruption or power cell failure do not arise.

[0203] The inventive compositions may further comprise a pharmaceutically acceptable carrier. Examples of suitable pharmaceutical carriers are well known in the art and include solutions, e.g. phosphate buffered saline solutions, water, emulsions, such as oil/water emulsions, various types of wetting agents, sterile solutions, liposomes, etc. Compositions comprising such carriers can be formulated by well known conventional methods. Formulations can comprise carbohydrates, buffer solutions, amino acids and/or surfactants. Carbohydrates may be non-reducing sugars, preferably trehalose, sucrose, octasulfate, sorbitol or xylitol. In general, as used herein, “pharmaceutically acceptable carrier” means any and all solvents, dispersion media, coatings, antibacterial and antifungal agents, isotonic and absorption delaying agents, compatible with pharmaceutical administration. The use of such media and agents for pharmaceutically active substances is well known in the art. Acceptable carriers, excipients, or stabilizers are nontoxic to recipients at the dosages and concentrations employed and include: additional buffering agents; preservatives; co-solvents; antioxidants, including ascorbic acid and methionine; chelating agents such as EDTA; metal complexes (e.g., Zn-protein complexes); biodegradable polymers, such as polyesters; salt-forming counter-ions, such as sodium, polyhydric sugar alcohols; amino acids, such as alanine, glycine, asparagine, 2-phenylalanine, and threonine; sugars or sugar alcohols, such as trehalose, sucrose, octasulfate, sorbitol or xylitol stachyose, mannose, sorbose, xylose, ribose, myoinisitose, galactose, lactitol, ribitol, myoinisitol, galactitol, glycerol, cyclitols (e.g., inositol), polyethylene glycol; sulfur containing reducing agents, such as glutathione, thioctic acid, sodium thioglycolate, thioglycerol, [alpha]-monothioglycerol, and sodium thio sulfate; low molecular weight proteins, such as human serum albumin, bovine serum albumin, gelatin, or other immunoglobulins; and hydrophilic polymers, such as polyvinylpyrrolidone. Such formulations may be used for continuous administrations which may be intravenuous or subcutaneous with and/or without pump systems. Amino acids may be charged amino acids, preferably lysine, lysine acetate, arginine, glutamate and/or histidine. Surfactants may be detergents, preferably with a molecular weight of >1.2 KD and/or a polyether, preferably with a molecular weight of >3 KD. Non-limiting examples for preferred detergents are Tween 20, Tween 40, Tween 60, Tween 80 or Tween 85. Non-limiting examples for preferred polyethers are PEG 3000, PEG 3350, PEG 4000 or PEG 5000. Buffer systems used in the present invention can have a preferred pH of 5-9 and may comprise citrate, succinate, phosphate, histidine and acetate.

[0204] The compositions of the present invention can be administered to the subject at a suitable dose which can be determined e.g. by dose escalating studies by administration of increasing doses of the polypeptide of the invention exhibiting cross-species specificity described herein to non-chimpanzee primates, for instance macaques. As set forth above, the antibody construct of the invention exhibiting cross-species specificity described herein can be advantageously used in identical form in preclinical testing in non-chimpanzee primates and as drug in humans. These compositions can also be administered in combination with other proteinaceous and non-proteinaceous drugs. These drugs may be administered simultaneously with the composition comprising the polypeptide of the invention as defined herein or separately before or after administration of said polypeptide in timely defined intervals and doses. The dosage regimen will be determined by the attending physician and clinical factors. As is well known in the medical arts, dosages for any one patient depend upon many factors, including the patient's size, body surface area, age, the particular compound to be administered, sex, time and route of administration, general health, and other drugs being administered concurrently.

[0205] Preparations for parenteral administration include sterile aqueous or non-aqueous solutions, suspensions, and emulsions. Examples of non-aqueous solvents are propylene glycol, polyethylene glycol, vegetable oils such as olive oil, and injectable organic esters such as ethyl oleate. Aqueous carriers include water, alcoholic/aqueous solutions, emulsions or suspensions, including saline and buffered media. Parenteral vehicles include sodium chloride solution, Ringer's dextrose, dextrose and sodium chloride, lactated Ringer's, or fixed oils. Intravenous vehicles include fluid and nutrient replenishers, electrolyte replenishers (such as those based on Ringer's dextrose), and the like. Preservatives and other additives may also be present such as, for example, antimicrobials, anti-oxidants, chelating agents, inert gases and the like. In addition, the composition of the present invention might comprise proteinaceous carriers, like, e.g., serum albumin or immunoglobulin, preferably of human origin. It is envisaged that the composition of the invention might comprise, in addition to the polypeptide of the invention defined herein, further biologically active agents, depending on the intended use of the composition. Such agents might be drugs acting on the gastro-intestinal system, drugs acting as cytostatica, drugs preventing hyperurikemia, drugs inhibiting immunoreactions (e.g. corticosteroids), drugs modulating the inflammatory response, drugs acting on the circulatory system and/or agents such as cytokines known in the art. It is also envisaged that the antibody construct of the present invention is applied in a co-therapy, i.e., in combination with another anti-cancer medicament.

[0206] The biological activity of the pharmaceutical composition defined herein can be determined for instance by cytotoxicity assays, as described in the following examples, in WO 99/54440 or by Schlereth et al. (Cancer Immunol. Immunother. 20 (2005), 1-12). “Efficacy” or “in vivo efficacy” as used herein refers to the response to therapy by the pharmaceutical composition of the invention, using e.g. standardized NCI response criteria. The success or in vivo efficacy of the therapy using a pharmaceutical composition of the invention refers to the effectiveness of the composition for its intended purpose, i.e. the ability of the composition to cause its desired effect, i.e. depletion of pathologic cells, e.g. tumor cells. The in vivo efficacy may be monitored by established standard methods for the respective disease entities including, but not limited to white blood cell counts, differentials, Fluorescence Activated Cell Sorting, bone marrow aspiration. In addition, various disease specific clinical chemistry parameters and other established standard methods may be used. Furthermore, computer-aided tomography, X-ray, nuclear magnetic resonance tomography (e.g. for National Cancer Institute-criteria based response assessment [Cheson B D, Horning S J, Coiffier B, Shipp M A, Fisher R I, Connors J M, Lister T A, Vose J, Grillo-Lopez A, Hagenbeek A, Cabanillas F, Klippensten D, Hiddemann W, Castellino R, Harris N L, Armitage J O, Carter W, Hoppe R, Canellos G P. Report of an international workshop to standardize response criteria for non-Hodgkin's lymphomas. NCI Sponsored International Working Group. J Clin Oncol. 1999 April; 17(4):1244]), positron-emission tomography scanning, white blood cell counts, differentials, Fluorescence Activated Cell Sorting, bone marrow aspiration, lymph node biopsies/histologies, and various lymphoma specific clinical chemistry parameters (e.g. lactate dehydrogenase) and other established standard methods may be used.

[0207] Another major challenge in the development of drugs such as the pharmaceutical composition of the invention is the predictable modulation of pharmacokinetic properties. To this end, a pharmacokinetic profile of the drug candidate, i.e. a profile of the pharmacokinetic parameters that affect the ability of a particular drug to treat a given condition, can be established. Pharmacokinetic parameters of the drug influencing the ability of a drug for treating a certain disease entity include, but are not limited to: half-life, volume of distribution, hepatic first-pass metabolism and the degree of blood serum binding. The efficacy of a given drug agent can be influenced by each of the parameters mentioned above.

[0208] “Half-life” means the time where 50% of an administered drug are eliminated through biological processes, e.g. metabolism, excretion, etc.

[0209] By “hepatic first-pass metabolism” is meant the propensity of a drug to be metabolized upon first contact with the liver, i.e. during its first pass through the liver.

[0210] “Volume of distribution” means the degree of retention of a drug throughout the various compartments of the body, like e.g. intracellular and extracellular spaces, tissues and organs, etc. and the distribution of the drug within these compartments.

[0211] “Degree of blood serum binding” means the propensity of a drug to interact with and bind to blood serum proteins, such as albumin, leading to a reduction or loss of biological activity of the drug.

[0212] Pharmacokinetic parameters also include bioavailability, lag time (Tlag), Tmax, absorption rates, more onset and/or Cmax for a given amount of drug administered. “Bioavailability” means the amount of a drug in the blood compartment. “Lag time” means the time delay between the administration of the drug and its detection and measurability in blood or plasma.

[0213] “Tmax” is the time after which maximal blood concentration of the drug is reached, and “Cmax” is the blood concentration maximally obtained with a given drug. The time to reach a blood or tissue concentration of the drug which is required for its biological effect is influenced by all parameters. Pharmacokinetic parameters of bispecific single chain antibodies exhibiting cross-species specificity, which may be determined in preclinical animal testing in non-chimpanzee primates as outlined above, are also set forth e.g. in the publication by Schlereth et al. (Cancer Immunol. Immunother. 20 (2005), 1-12).

[0214] The term “toxicity” as used herein refers to the toxic effects of a drug manifested in adverse events or severe adverse events. These side events might refer to a lack of tolerability of the drug in general and/or a lack of local tolerance after administration. Toxicity could also include teratogenic or carcinogenic effects caused by the drug.

[0215] The term “safety”, “in vivo safety” or “tolerability” as used herein defines the administration of a drug without inducing severe adverse events directly after administration (local tolerance) and during a longer period of application of the drug. “Safety”, “in vivo safety” or “tolerability” can be evaluated e.g. at regular intervals during the treatment and follow-up period. Measurements include clinical evaluation, e.g. organ manifestations, and screening of laboratory abnormalities. Clinical evaluation may be carried out and deviations to normal findings recorded/coded according to NCI-CTC and/or MedDRA standards. Organ manifestations may include criteria such as allergy/immunology, blood/bone marrow, cardiac arrhythmia, coagulation and the like, as set forth e.g. in the Common Terminology Criteria for adverse events v3.0 (CTCAE). Laboratory parameters which may be tested include for instance hematology, clinical chemistry, coagulation profile and urine analysis and examination of other body fluids such as serum, plasma, lymphoid or spinal fluid, liquor and the like. Safety can thus be assessed e.g. by physical examination, imaging techniques (i.e. ultrasound, x-ray, CT scans, Magnetic Resonance Imaging (MRI), other measures with technical devices (i.e. electrocardiogram), vital signs, by measuring laboratory parameters and recording adverse events. For example, adverse events in non-chimpanzee primates in the uses and methods according to the invention may be examined by histopathological and/or histochemical methods.

[0216] The term “effective dose” or “effective dosage” is defined as an amount sufficient to achieve or at least partially achieve the desired effect. The term “therapeutically effective dose” is defined as an amount sufficient to cure or at least partially arrest the disease and its complications in a patient already suffering from the disease. Amounts effective for this use will depend upon the severity of the infection and the general state of the subject's own immune system. The term “patient” includes human and other mammalian subjects that receive either prophylactic or therapeutic treatment.

[0217] The term “effective and non-toxic dose” as used herein refers to a tolerable dose of an inventive antibody construct which is high enough to cause depletion of pathologic cells, tumor elimination, tumor shrinkage or stabilization of disease without or essentially without major toxic effects. Such effective and non-toxic doses may be determined e.g. by dose escalation studies described in the art and should be below the dose inducing severe adverse side events (dose limiting toxicity, DLT).

[0218] The above terms are also referred to e.g. in the Preclinical safety evaluation of biotechnology-derived pharmaceuticals S6; ICH Harmonised Tripartite Guideline; ICH Steering Committee meeting on Jul. 16, 1997.

[0219] The appropriate dosage, or therapeutically effective amount, of the antibody construct of the invention will depend on the condition to be treated, the severity of the condition, prior therapy, and the patient's clinical history and response to the therapeutic agent. The proper dose can be adjusted according to the judgment of the attending physician such that it can be administered to the patient one time or over a series of administrations. The pharmaceutical composition can be administered as a sole therapeutic or in combination with additional therapies such as anti-cancer therapies as needed.

[0220] The pharmaceutical compositions of this invention are particularly useful for parenteral administration, i.e., subcutaneously, intramuscularly, intravenously, intra-articular and/or intra-synovial. Parenteral administration can be by bolus injection or continuous infusion.

[0221] If the pharmaceutical composition has been lyophilized, the lyophilized material is first reconstituted in an appropriate liquid prior to administration. The lyophilized material may be reconstituted in, e.g., bacteriostatic water for injection (BWFI), physiological saline, phosphate buffered saline (PBS), or the same formulation the protein had been in prior to lyophilization.

[0222] In an internal analysis of proprietary mRNA expression data it has been surprisingly found that CDH19 expression is elevated in both primary and metastatic melanoma tumors compared to normal, untransformed tissues. Internal analysis also confirmed that expression of CDH19 in normal tissues is limited to neural crest derived peripheral nerve ganglia and nerve fibers. The differential CDH19 expression in normal and tumor tissues makes this protein attractive for cell-surface targeting therapeutics. Although CDH 19 was discussed as one marker as part of long lists of markers associated with some cancer types (see e.g. WO2009/055937) or Parkinson's disease (see e.g. WO2005/067391) CDH19 was never discussed as a prognostic marker or a drug target in connection with melanoma tumors.

[0223] As stated above, the present invention provides an isolated multispecific antibody construct comprising a first human binding domain capable of binding to human CDH19 on the surface of a target cell and a second domain capable of binding to human CD3 on the surface of a T cell.

[0224] The “CDH19 extracellular domain” or “CDH19 ECD” refers to a form of CDH19 which is essentially free of transmembrane and cytoplasmic domains of CDH19. It will be understood by the skilled artisan that the transmembrane domain identified for the CDH19 polypeptide of the present invention is identified pursuant to criteria routinely employed in the art for identifying that type of hydrophobic domain. The exact boundaries of a transmembrane domain may vary but most likely by no more than about 5 amino acids at either end of the domain specifically mentioned herein. A preferred human CDH19 ECD is shown in SEQ ID NO: 948. In this context it is understood that the CDH19 ECD represents the part of CDH19 on the surface of a target cell.

[0225] The T cell CD3 receptor complex is a protein complex and is composed of four distinct chains. In mammals, the complex contains a CD3γ chain, a CD36 chain, and two CD3ε (epsilon) chains. These chains associate with a molecule known as the T cell receptor (TCR) and the ζ chain to generate an activation signal in T lymphocytes.

[0226] The redirected lysis of target cells via the recruitment of T cells by a multispecific, at least bispecific, antibody construct involves cytolytic synapse formation and delivery of perforin and granzymes. The engaged T cells are capable of serial target cell lysis, and are not affected by immune escape mechanisms interfering with peptide antigen processing and presentation, or clonal T cell differentiation; see, for example, WO 2007/042261.

[0227] The affinity of the first binding domain for human CDH19 is preferably ≦15 nM, more preferably ≦10 nM, even more preferably ≦5 nM, even more preferably ≦1 nM, even more preferably ≦0.5 nM, even more preferably ≦0.1 nM, and most preferably ≦0.05 nM. The affinity of the first binding domain for macaque CDH19 is preferably ≦15 nM, more preferably ≦10 nM, even more preferably ≦5 nM, even more preferably ≦1 nM, even more preferably ≦0.5 nM, even more preferably ≦0.1 nM, and most preferably ≦0.05 nM or even≦0.01 nM. The affinity can be measured for example in a Biacore assay or in a Scatchard assay, e.g. as described in the Examples. The affinity gap for binding to macaque CDH19 versus human CDH19 is preferably [1:10-1:5] or [5:1-10:1], more preferably [1:5-5:1], and most preferably [1:2-3:1] or even [1:1-3:1]. Other methods of determining the affinity are well-known to the skilled person.

[0228] Human antibodies, respectively human antibody constructs, avoid some of the problems associated with antibodies/antibody constructs that possess murine or rat variable and/or constant regions. The presence of such murine or rat derived proteins can lead to the rapid clearance of the antibodies/antibody constructs or can lead to the generation of an immune response against the antibody/antibody construct by a patient. In order to avoid the utilization of murine or rat derived antibodies/antibody constructs, human or fully human antibodies can be generated through the introduction of human antibody function into a rodent so that the rodent produces fully human antibodies.

[0229] The ability to clone and reconstruct megabase-sized human loci in YACs and to introduce them into the mouse germline provides a powerful approach to elucidating the functional components of very large or crudely mapped loci as well as generating useful models of human disease. Furthermore, the utilization of such technology for substitution of mouse loci with their human equivalents could provide unique insights into the expression and regulation of human gene products during development, their communication with other systems, and their involvement in disease induction and progression.

[0230] An important practical application of such a strategy is the “humanization” of the mouse humoral immune system. Introduction of human immunoglobulin (Ig) loci into mice in which the endogenous Ig genes have been inactivated offers the opportunity to study the mechanisms underlying programmed expression and assembly of antibodies as well as their role in B-cell development. Furthermore, such a strategy could provide an ideal source for production of fully human monoclonal antibodies (mAbs)—an important milestone towards fulfilling the promise of antibody therapy in human disease. Fully human antibodies/antibody constructs are expected to minimize the immunogenic and allergic responses intrinsic to mouse or mouse-derivatized mAbs and thus to increase the efficacy and safety of the administered antibodies/antibody constructs. The use of fully human antibodies/antibody constructs can be expected to provide a substantial advantage in the treatment of chronic and recurring human diseases, such as inflammation, autoimmunity, and cancer, which require repeated compound administrations.

[0231] One approach towards this goal was to engineer mouse strains deficient in mouse antibody production with large fragments of the human Ig loci in anticipation that such mice would produce a large repertoire of human antibodies in the absence of mouse antibodies. Large human Ig fragments would preserve the large variable gene diversity as well as the proper regulation of antibody production and expression. By exploiting the mouse machinery for antibody diversification and selection and the lack of immunological tolerance to human proteins, the reproduced human antibody repertoire in these mouse strains should yield high affinity antibodies against any antigen of interest, including human antigens. Using the hybridoma technology, antigen-specific human mAbs with the desired specificity could be readily produced and selected. This general strategy was demonstrated in connection with our generation of the first XenoMouse mouse strains, as published in 1994. (See Green et al. Nature Genetics 7:13-21 (1994)) The XenoMouse strains were engineered with yeast artificial chromosomes (YACs) containing 245 kb and 190 kb-sized germline configuration fragments of the human heavy chain locus and kappa light chain locus, respectively, which contained core variable and constant region sequences. Id. The human Ig containing YACs proved to be compatible with the mouse system for both rearrangement and expression of antibodies and were capable of substituting for the inactivated mouse Ig genes. This was demonstrated by their ability to induce B-cell development, to produce an adult-like human repertoire of fully human antibodies, and to generate antigen-specific human mAbs. These results also suggested that introduction of larger portions of the human Ig loci containing greater numbers of V genes, additional regulatory elements, and human Ig constant regions might recapitulate substantially the full repertoire that is characteristic of the human humoral response to infection and immunization. The work of Green et al. was recently extended to the introduction of greater than approximately 80% of the human antibody repertoire through introduction of megabase sized, germline configuration YAC fragments of the human heavy chain loci and kappa light chain loci, respectively. See Mendez et al. Nature Genetics 15:146-156 (1997) and U.S. patent application Ser. No. 08/759,620, filed Dec. 3, 1996, the disclosures of which are hereby incorporated by reference.

[0232] The production of the XenoMouse mice is further discussed and delineated in U.S. patent application Ser. No. 07/466,008, filed Jan. 12, 1990, Ser. No. 07/610,515, filed Nov. 8, 1990, Ser. No. 07/919,297, filed Jul. 24, 1992, Ser. No. 07/922,649, filed Jul. 30, 1992, filed Ser. No. 08/031,801, filed Mar. 15, 1993, Ser. No. 08/112,848, filed Aug. 27, 1993, Ser. No. 08/234,145, filed Apr. 28, 1994, Ser. No. 08/376,279, filed Jan. 20, 1995, Ser. No. 08/430,938, Apr. 27, 1995, Ser. No. 08/464,584, filed Jun. 5, 1995, Ser. No. 08/464,582, filed Jun. 5, 1995, Ser. No. 08/463,191, filed Jun. 5, 1995, Ser. No. 08/462,837, filed Jun. 5, 1995, Ser. No. 08/486,853, filed Jun. 5, 1995, Ser. No. 08/486,857, filed Jun. 5, 1995, Ser. No. 08/486,859, filed Jun. 5, 1995, Ser. No. 08/462,513, filed Jun. 5, 1995, Ser. No. 08/724,752, filed Oct. 2, 1996, and Ser. No. 08/759,620, filed Dec. 3, 1996 and U.S. Pat. Nos. 6,162,963, 6,150,584, 6,114,598, 6,075,181, and 5,939,598 and Japanese Patent Nos. 3 068 180 B2, 3 068 506 B2, and 3 068 507 B2. See also Mendez et al. Nature Genetics 15:146-156 (1997) and Green and Jakobovits J. Exp. Med. 188:483-495 (1998). See also European Patent No., EP 0 463151 B1, grant published Jun. 12, 1996, International Patent Application No., WO 94/02602, published Feb. 3, 1994, International Patent Application No., WO 96/34096, published Oct. 31, 1996, WO 98/24893, published Jun. 11, 1998, WO 00/76310, published Dec. 21, 2000, WO 03/47336. The disclosures of each of the above-cited patents, applications, and references are hereby incorporated by reference in their entirety.

[0233] In an alternative approach, others, including GenPharm International, Inc., have utilized a “minilocus” approach. In the minilocus approach, an exogenous Ig locus is mimicked through the inclusion of pieces (individual genes) from the Ig locus. Thus, one or more V.sub.H genes, one or more D.sub.H genes, one or more J.sub.H genes, a mu constant region, and a second constant region (preferably a gamma constant region) are formed into a construct for insertion into an animal. This approach is described in U.S. Pat. No. 5,545,807 to Surani et al. and U.S. Pat. Nos. 5,545,806, 5,625,825, 5,625,126, 5,633,425, 5,661,016, 5,770,429, 5,789,650, 5,814,318, 5,877,397, 5,874,299, and 6,255,458 each to Lonberg and Kay, U.S. Pat. Nos. 5,591,669 and 6,023.010 to Krimpenfort and Berns, U.S. Pat. Nos. 5,612,205, 5,721,367, and 5,789,215 to Berns et al., and U.S. Pat. No. 5,643,763 to Choi and Dunn, and GenPharm International U.S. patent application Ser. No. 07/574,748, filed Aug. 29, 1990, Ser. No. 07/575,962, filed Aug. 31, 1990, Ser. No. 07/810,279, filed Dec. 17, 1991, Ser. No. 07/853,408, filed Mar. 18, 1992, Ser. No. 07/904,068, filed Jun. 23, 1992, Ser. No. 07/990,860, filed Dec. 16, 1992, Ser. No. 08/053,131, filed Apr. 26, 1993, Ser. No. 08/096,762, filed Jul. 22, 1993, Ser. No. 08/155,301, filed Nov. 18, 1993, Ser. No. 08/161,739, filed Dec. 3, 1993, Ser. No. 08/165,699, filed Dec. 10, 1993, Ser. No. 08/209,741, filed Mar. 9, 1994, the disclosures of which are hereby incorporated by reference. See also European Patent No. 0 546 073 B1, International Patent Application Nos. WO 92/03918, WO 92/22645, WO 92/22647, WO 92/22670, WO 93/12227, WO 94/00569, WO 94/25585, WO 96/14436, WO 97/13852, and WO 98/24884 and U.S. Pat. No. 5,981,175, the disclosures of which are hereby incorporated by reference in their entirety. See further Taylor et al., 1992, Chen et al., 1993, Tuaillon et al., 1993, Choi et al., 1993, Lonberg et al., (1994), Taylor et al., (1994), and Tuaillon et al., (1995), Fishwild et al., (1996), the disclosures of which are hereby incorporated by reference in their entirety.

[0234] Kirin has also demonstrated the generation of human antibodies from mice in which, through microcell fusion, large pieces of chromosomes, or entire chromosomes, have been introduced. See European Patent Application Nos. 773 288 and 843 961, the disclosures of which are hereby incorporated by reference.Xenerex Biosciences is developing a technology for the potential generation of human antibodies. In this technology, SCID mice are reconstituted with human lymphatic cells, e.g., B and/or T cells. Mice are then immunized with an antigen and can generate an immune response against the antigen. See U.S. Pat. Nos. 5,476,996, 5,698,767, and 5,958,765.

[0235] Human anti-mouse antibody (HAMA) responses have led the industry to prepare chimeric or otherwise humanized antibodies. While chimeric antibodies have a human constant region and a murine variable region, it is expected that certain human anti-chimeric antibody (HACA) responses will be observed, particularly in chronic or multi-dose utilizations of the antibody. Thus, it would be desirable to provide fully human antibodies against EGFRvIII in order to vitiate concerns and/or effects of HAMA or HACA response.

[0236] Cytotoxicity mediated by CDH19/CD3 bispecific antibody constructs can be measured in various ways. Effector cells can be e.g. stimulated enriched (human) CD8 positive T cells or unstimulated (human) peripheral blood mononuclear cells (PBMC). If the target cells are of macaque origin or express or are transfected with macaque CDH19, the effector cells should also be of macaque origin such as a macaque T cell line, e.g. 4119LnPx. The target cells should express (at least the extracellular domain of) CDH19, e.g. human or macaque CDH19. Target cells can be a cell line (such as CHO) which is stably or transiently transfected with CDH19, e.g. human or macaque CDH19. Alternatively, the target cells can be a CDH19 positive natural expresser cell line, such as the human myeloma cell line CHL-1 or Colo-699. Usually EC50-values are expected to be lower with target cell lines expressing higher levels of CDH19 on the cell surface. The effector to target cell (E:T) ratio is usually about 10:1, but can also vary. Cytotoxic activity of CDH19/CD3 bispecific antibody constructs can be measured in an 51-chromium release assay (incubation time of about 18 hours) or in a in a FACS-based cytotoxicity assay (incubation time of about 48 hours). Modifications of the assay incubation time (cytotoxic reaction) are also possible. Other methods of measuring cytotoxicity are well-known to the skilled person and comprise MTT or MTS assays, ATP-based assays including bioluminescent assays, the sulforhodamine B (SRB) assay, WST assay, clonogenic assay and the ECIS technology.

[0237] The cytotoxic activity mediated by CDH19/CD3 bispecific antibody constructs of the present invention is preferably measured in a cell-based cytotoxicity assay. It is represented by the EC₅₀ value, which corresponds to the half maximal effective concentration (concentration of the antibody construct which induces a cytotoxic response halfway between the baseline and maximum). Preferably, the EC₅₀ value of the CDH19/CD3 bispecific antibody constructs is ≦20.000 μg/ml, more preferably ≦5000 μg/ml, even more preferably ≦1000 μg/ml, even more preferably ≦500 μg/ml, even more preferably ≦350 μg/ml, even more preferably ≦320 μg/ml, even more preferably ≦250 μg/ml, even more preferably ≦100 μg/ml, even more preferably ≦50 μg/ml, even more preferably ≦10 μg/ml, and most preferably ≦5 μg/ml.

[0238] Any of the above given EC₅₀ values can be combined with any one of the indicated scenarios of a cell-based cytotoxicity assay. For example, when (human) CD8 positive T cells or a macaque T cell line are used as effector cells, the EC₅₀ value of the CDH19/CD3 bispecific antibody construct is preferably ≦1000 μg/ml, more preferably ≦500 μg/ml, even more preferably ≦250 μg/ml, even more preferably ≦100 μg/ml, even more preferably ≦50 μg/ml, even more preferably ≦10 μg/ml, and most preferably ≦5 μg/ml. If in this assay the target cells are (human or macaque) CDH19 transfected cells such as CHO cells, the EC₅₀ value of the CDH19/CD3 bispecific antibody construct is preferably ≦150 μg/ml, more preferably ≦100 μg/ml, even more preferably ≦50 μg/ml, even more preferably ≦30 μg/ml, even more preferably ≦10 μg/ml, and most preferably ≦5 μg/ml.

[0239] If the target cells are a CDH19 positive natural expresser cell line, then the EC₅₀ value is preferably ≦350 μg/ml, more preferably ≦320 μg/ml, even more preferably ≦250 μg/ml, even more preferably ≦200 μg/ml, even more preferably ≦100 μg/ml, even more preferably 150 μg/ml, even more preferably ≦100 μg/ml, and most preferably ≦50 μg/ml, or lower. When (human) PBMCs are used as effector cells, the EC₅₀ value of the CDH19/CD3 bispecific antibody construct is preferably ≦1000 μg/ml, more preferably ≦750 μg/ml, more preferably ≦500 μg/ml, even more preferably ≦350 μg/ml, even more preferably ≦320 μg/ml, even more preferably ≦250 μg/ml, even more preferably ≦100 μg/ml, and most preferably ≦50 μg/ml, or lower.

[0240] The difference in cytotoxic activity between the monomeric and the dimeric isoform of individual CDH19/CD3 bispecific antibody constructs is referred to as “potency gap”. This potency gap can e.g. be calculated as ratio between EC₅₀ values of the molecule's monomeric and dimeric form. Potency gaps of the CDH19/CD3 bispecific antibody constructs of the present invention are preferably ≦5, more preferably ≦4, even more preferably ≦3, even more preferably ≦2 and most preferably ≦1.

[0241] The antibody construct of the invention is a fusion protein comprising at least two binding domains, with or without peptide linkers (spacer peptides). Among the suitable peptide linkers are those described in U.S. Pat. Nos. 4,751,180 and 4,935,233 or WO 88/09344. Another method for preparing oligomeric antibody constuct derivatives involves use of a leucine zipper. Leucine zipper domains are peptides that promote oligomerization of the proteins in which they are found. Leucine zippers were originally identified in several DNA-binding proteins (Landschulz et al., 1988, Science 240:1759), and have since been found in a variety of different proteins. Among the known leucine zippers are naturally occurring peptides and derivatives thereof that dimerize or trimerize. Examples of leucine zipper domains suitable for producing soluble oligomeric proteins are described in PCT application WO 94/10308, and the leucine zipper derived from lung surfactant protein D (SPD) described in Hoppe et al., 1994, FEBS Letters 344:191, hereby incorporated by reference. The use of a modified leucine zipper that allows for stable trimerization of a heterologous protein fused thereto is described in Fanslow et al., 1994, Semin. Immunol. 6:267-78. In one approach, recombinant fusion proteins comprising CDH19 antibody fragment or derivative fused to a leucine zipper peptide are expressed in suitable host cells, and the soluble oligomeric CDH19 antibody fragments or derivatives that form are recovered from the culture supernatant.

[0242] Covalent modifications of antigen binding proteins are included within the scope of this invention, and are generally, but not always, done post-translationally. For example, several types of covalent modifications of the antigen binding protein are introduced into the molecule by reacting specific amino acid residues of the antigen binding protein with an organic derivatizing agent that is capable of reacting with selected side chains or the N- or C-terminal residues.

[0243] Cysteinyl residues most commonly are reacted with α-haloacetates (and corresponding amines), such as chloroacetic acid or chloroacetamide, to give carboxymethyl or carboxyamidomethyl derivatives. Cysteinyl residues also are derivatized by reaction with bromotrifluoroacetone, α-bromo-β-(5-imidozoyl)propionic acid, chloroacetyl phosphate, N-alkylmaleimides, 3-nitro-2-pyridyl disulfide, methyl 2-pyridyl disulfide, p-chloromercuribenzoate, 2-chloromercuri-4-nitrophenol, or chloro-7-nitrobenzo-2-oxa-1,3-diazole.

[0244] Histidyl residues are derivatized by reaction with diethylpyrocarbonate at pH 5.5-7.0 because this agent is relatively specific for the histidyl side chain. Para-bromophenacyl bromide also is useful; the reaction is preferably performed in 0.1 M sodium cacodylate at pH 6.0.

[0245] Lysinyl and amino terminal residues are reacted with succinic or other carboxylic acid anhydrides. Derivatization with these agents has the effect of reversing the charge of the lysinyl residues. Other suitable reagents for derivatizing alpha-amino-containing residues include imidoesters such as methyl picolinimidate; pyridoxal phosphate; pyridoxal; chloroborohydride; trinitrobenzenesulfonic acid; O-methylisourea; 2,4-pentanedione; and transaminase-catalyzed reaction with glyoxylate.

[0246] Arginyl residues are modified by reaction with one or several conventional reagents, among them phenylglyoxal, 2,3-butanedione, 1,2-cyclohexanedione, and ninhydrin. Derivatization of arginine residues requires that the reaction be performed in alkaline conditions because of the high pKa of the guanidine functional group. Furthermore, these reagents may react with the groups of lysine as well as the arginine epsilon-amino group.

[0247] The specific modification of tyrosyl residues may be made, with particular interest in introducing spectral labels into tyrosyl residues by reaction with aromatic diazonium compounds or tetranitromethane. Most commonly, N-acetylimidizole and tetranitromethane are used to form O-acetyl tyrosyl species and 3-nitro derivatives, respectively. Tyrosyl residues are iodinated using ¹²⁵I or ¹³¹I to prepare labeled proteins for use in radioimmunoassay, the chloramine T method described above being suitable.

[0248] Carboxyl side groups (aspartyl or glutamyl) are selectively modified by reaction with carbodiimides (R′—N—N═C═N—R′), where R and R′ are optionally different alkyl groups, such as 1-cyclohexyl-3-(2-morpholinyl-4-ethyl)carbodiimide or 1-ethyl-3-(4-azonia-4,4-dimethylpentyl)carbodiimide. Furthermore, aspartyl and glutamyl residues are converted to asparaginyl and glutaminyl residues by reaction with ammonium ions.

[0249] Derivatization with bifunctional agents is useful for crosslinking antigen binding proteins to a water-insoluble support matrix or surface for use in a variety of methods. Commonly used crosslinking agents include, e.g., 1,1-bis(diazoacetyl)-2-phenylethane, glutaraldehyde, N-hydroxysuccinimide esters, for example, esters with 4-azidosalicylic acid, homobifunctional imidoesters, including disuccinimidyl esters such as 3,3′-dithiobis(succinimidylpropionate), and bifunctional maleimides such as bis-N-maleimido-1,8-octane. Derivatizing agents such as methyl-3-[(p-azidophenyl)dithio]propioimidate yield photoactivatable intermediates that are capable of forming crosslinks in the presence of light. Alternatively, reactive water-insoluble matrices such as cyanogen bromide-activated carbohydrates and the reactive substrates described in U.S. Pat. Nos. 3,969,287; 3,691,016; 4,195,128; 4,247,642; 4,229,537; and 4,330,440 are employed for protein immobilization.

[0250] Glutaminyl and asparaginyl residues are frequently deamidated to the corresponding glutamyl and aspartyl residues, respectively. Alternatively, these residues are deamidated under mildly acidic conditions. Either form of these residues falls within the scope of this invention.

[0251] Other modifications include hydroxylation of proline and lysine, phosphorylation of hydroxyl groups of seryl or threonyl residues, methylation of the α-amino groups of lysine, arginine, and histidine side chains (T. E. Creighton, Proteins: Structure and Molecular Properties, W. H. Freeman & Co., San Francisco, 1983, pp. 79-86), acetylation of the N-terminal amine, and amidation of any C-terminal carboxyl group.

[0252] Another type of covalent modification of the antigen binding protein included within the scope of this invention comprises altering the glycosylation pattern of the protein. As is known in the art, glycosylation patterns can depend on both the sequence of the protein (e.g., the presence or absence of particular glycosylation amino acid residues, discussed below), or the host cell or organism in which the protein is produced. Particular expression systems are discussed below.

[0253] Glycosylation of polypeptides is typically either N-linked or O-linked. N-linked refers to the attachment of the carbohydrate moiety to the side chain of an asparagine residue. The tri-peptide sequences asparagine-X-serine and asparagine-X-threonine, where X is any amino acid except proline, are the recognition sequences for enzymatic attachment of the carbohydrate moiety to the asparagine side chain. Thus, the presence of either of these tri-peptide sequences in a polypeptide creates a potential glycosylation site. O-linked glycosylation refers to the attachment of one of the sugars N-acetylgalactosamine, galactose, or xylose, to a hydroxyamino acid, most commonly serine or threonine, although 5-hydroxyproline or 5-hydroxylysine may also be used.

[0254] Addition of glycosylation sites to the antigen binding protein is conveniently accomplished by altering the amino acid sequence such that it contains one or more of the above-described tri-peptide sequences (for N-linked glycosylation sites). The alteration may also be made by the addition of, or substitution by, one or more serine or threonine residues to the starting sequence (for O-linked glycosylation sites). For ease, the antigen binding protein amino acid sequence is preferably altered through changes at the DNA level, particularly by mutating the DNA encoding the target polypeptide at preselected bases such that codons are generated that will translate into the desired amino acids.

[0255] Another means of increasing the number of carbohydrate moieties on the antigen binding protein is by chemical or enzymatic coupling of glycosides to the protein. These procedures are advantageous in that they do not require production of the protein in a host cell that has glycosylation capabilities for N- and O-linked glycosylation. Depending on the coupling mode used, the sugar(s) may be attached to (a) arginine and histidine, (b) free carboxyl groups, (c) free sulfhydryl groups such as those of cysteine, (d) free hydroxyl groups such as those of serine, threonine, or hydroxyproline, (e) aromatic residues such as those of phenylalanine, tyrosine, or tryptophan, or (f) the amide group of glutamine. These methods are described in WO 87/05330 published Sep. 11, 1987, and in Aplin and Wriston, 1981, CRC Crit. Rev. Biochem., pp. 259-306.

[0256] Removal of carbohydrate moieties present on the starting antigen binding protein may be accomplished chemically or enzymatically. Chemical deglycosylation requires exposure of the protein to the compound trifluoromethanesulfonic acid, or an equivalent compound. This treatment results in the cleavage of most or all sugars except the linking sugar (N-acetylglucosamine or N-acetylgalactosamine), while leaving the polypeptide intact. Chemical deglycosylation is described by Hakimuddin et al., 1987, Arch. Biochem. Biophys. 259:52 and by Edge et al., 1981, Anal. Biochem. 118:131. Enzymatic cleavage of carbohydrate moieties on polypeptides can be achieved by the use of a variety of endo- and exo-glycosidases as described by Thotakura et al., 1987, Meth. Enzymol. 138:350. Glycosylation at potential glycosylation sites may be prevented by the use of the compound tunicamycin as described by Duskin et al., 1982, J. Biol. Chem. 257:3105. Tunicamycin blocks the formation of protein-N-glycoside linkages.

[0257] Another type of covalent modification of the antigen binding protein comprises linking the antigen binding protein to various non-proteinaceous polymers, including, but not limited to, various polyols such as polyethylene glycol, polypropylene glycol or polyoxyalkylenes, in the manner set forth in U.S. Pat. No. 4,640,835; 4,496,689; 4,301,144; 4,670,417; 4,791,192 or 4,179,337. In addition, as is known in the art, amino acid substitutions may be made in various positions within the antigen binding protein to facilitate the addition of polymers such as PEG.

[0258] In some embodiments, the covalent modification of the antigen binding proteins of the invention comprises the addition of one or more labels.

[0259] The term “labelling group” means any detectable label. Examples of suitable labelling groups include, but are not limited to, the following: radioisotopes or radionuclides (e.g., ³H, ¹⁴C, ¹⁵N, ³⁵S, ⁹⁰Y, ⁹⁹Tc, ¹¹¹In, ¹²⁵I, ¹³¹I), fluorescent groups (e.g., FITC, rhodamine, lanthanide phosphors), enzymatic groups (e.g., horseradish peroxidase, β-galactosidase, luciferase, alkaline phosphatase), chemiluminescent groups, biotinyl groups, or predetermined polypeptide epitopes recognized by a secondary reporter (e.g., leucine zipper pair sequences, binding sites for secondary antibodies, metal binding domains, epitope tags). In some embodiments, the labelling group is coupled to the antigen binding protein via spacer arms of various lengths to reduce potential steric hindrance. Various methods for labelling proteins are known in the art and may be used in performing the present invention.

[0260] In general, labels fall into a variety of classes, depending on the assay in which they are to be detected: a) isotopic labels, which may be radioactive or heavy isotopes; b) magnetic labels (e.g., magnetic particles); c) redox active moieties; d) optical dyes; enzymatic groups (e.g. horseradish peroxidase, β-galactosidase, luciferase, alkaline phosphatase); e) biotinylated groups; and f) predetermined polypeptide epitopes recognized by a secondary reporter (e.g., leucine zipper pair sequences, binding sites for secondary antibodies, metal binding domains, epitope tags, etc.). In some embodiments, the labelling group is coupled to the antigen binding protein via spacer arms of various lengths to reduce potential steric hindrance. Various methods for labelling proteins are known in the art and may be used in performing the present invention.

[0261] Specific labels include optical dyes, including, but not limited to, chromophores, phosphors and fluorophores, with the latter being specific in many instances. Fluorophores can be either “small molecule” fluores, or proteinaceous fluores.

[0262] By “fluorescent label” is meant any molecule that may be detected via its inherent fluorescent properties. Suitable fluorescent labels include, but are not limited to, fluorescein, rhodamine, tetramethylrhodamine, eosin, erythrosin, coumarin, methyl-coumarins, pyrene, Malacite green, stilbene, Lucifer Yellow, Cascade BlueJ, Texas Red, IAEDANS, EDANS, BODIPY FL, LC Red 640, Cy 5, Cy 5.5, LC Red 705, Oregon green, the Alexa-Fluor dyes (Alexa Fluor 350, Alexa Fluor 430, Alexa Fluor 488, Alexa Fluor 546, Alexa Fluor 568, Alexa Fluor 594, Alexa Fluor 633, Alexa Fluor 660, Alexa Fluor 680), Cascade Blue, Cascade Yellow and R-phycoerythrin (PE) (Molecular Probes, Eugene, Oreg.), FITC, Rhodamine, and Texas Red (Pierce, Rockford, Ill.), Cy5, Cy5.5, Cy7 (Amersham Life Science, Pittsburgh, Pa.). Suitable optical dyes, including fluorophores, are described in Molecular Probes Handbook by Richard P. Haugland, hereby expressly incorporated by reference.

[0263] Suitable proteinaceous fluorescent labels also include, but are not limited to, green fluorescent protein, including a Renilla, Ptilosarcus, or Aequorea species of GFP (Chalfie et al., 1994, Science 263:802-805), EGFP (Clontech Laboratories, Inc., Genbank Accession Number U55762), blue fluorescent protein (BFP, Quantum Biotechnologies, Inc. 1801 de Maisonneuve Blvd. West, 8th Floor, Montreal, Quebec, Canada H3H 1J9; Stauber, 1998, Biotechniques 24:462-471; Heim et al., 1996, Curr. Biol. 6:178-182), enhanced yellow fluorescent protein (EYFP, Clontech Laboratories, Inc.), luciferase (Ichiki et al., 1993, J. Immunol. 150:5408-5417), β galactosidase (Nolan et al., 1988, Proc. Natl. Acad. Sci. U.S.A. 85:2603-2607) and Renilla (WO92/15673, WO95/07463, WO98/14605, WO98/26277, WO99/49019, U.S. Pat. Nos. 5,292,658, 5,418,155, 5,683,888, 5,741,668, 5,777,079, 5,804,387, 5,874,304, 5,876,995, 5,925,558). All of the above-cited references are expressly incorporated herein by reference.

[0264] The antibody construct of the invention may also comprise additional domains, which e.g. are helpful in the isolation of the molecule or relate to an adapted pharmacokinetic profile of the molecule.

[0265] Domains helpful for the isolation of an antibody construct may be elected from peptide motives or secondarily introduced moieties, which can be captured in an isolation method, e.g. an isolation column. A non-limiting embodiments of such additional domains comprise peptide motives known as Myc-tag, HAT-tag, HA-tag, TAP-tag, GST-tag, chitin binding domain (CBD-tag), maltose binding protein (MBP-tag), Flag-tag, Strep-tag and variants thereof (e.g. StrepII-tag) and His-tag. All herein disclosed antibody constructs characterized by the identified CDRs are preferred to comprise a His-tag domain, which is generally known as a repeat of consecutive His residues in the amino acid sequence of a molecule, preferably of six His residues.

[0266] As described in appended example 2 a broad number of CDH19 specific binder has been characterized with respect to identified binding characteristics and those binders were grouped into five different bins, which refers to five different subgroups of CDH19 specific binding domains. Accordingly, in one embodiment the antibody construct of the invention the first binding domain comprises a VH region comprising CDR-H1, CDR-H2 and CDR-H3 and a VL region comprising CDR-L1, CDR-L2 and CDR-L3 selected from the group consisting of:
[0267] (a) CDR-H1 as depicted in SEQ ID NO: 52, CDR-H2 as depicted in SEQ ID NO: 53, CDR-H3 as depicted in SEQ ID NO: 54, CDR-L1 as depicted in SEQ ID NO: 220, CDR-L2 as depicted in SEQ ID NO: 221 and CDR-L3 as depicted in SEQ ID NO: 222, CDR-H1 as depicted in SEQ ID NO: 82, CDR-H2 as depicted in SEQ ID NO: 83, CDR-H3 as depicted in SEQ ID NO: 84, CDR-L1 as depicted in SEQ ID NO: 250, CDR-L2 as depicted in SEQ ID NO: 251 and CDR-L3 as depicted in SEQ ID NO: 252, CDR-H1 as depicted in SEQ ID NO: 82, CDR-H2 as depicted in SEQ ID NO: 83, CDR-H3 as depicted in SEQ ID NO: 84, CDR-L1 as depicted in SEQ ID NO: 250, CDR-L2 as depicted in SEQ ID NO: 251 and CDR-L3 as depicted in SEQ ID NO: 927, CDR-H1 as depicted in SEQ ID NO: 82, CDR-H2 as depicted in SEQ ID NO: 83, CDR-H3 as depicted in SEQ ID NO: 909, CDR-L1 as depicted in SEQ ID NO: 250, CDR-L2 as depicted in SEQ ID NO: 251 and CDR-L3 as depicted in SEQ ID NO: 927, CDR-H1 as depicted in SEQ ID NO: 52, CDR-H2 as depicted in SEQ ID NO: 53, CDR-H3 as depicted in SEQ ID NO: 54, CDR-L1 as depicted in SEQ ID NO: 220, CDR-L2 as depicted in SEQ ID NO: 221 and CDR-L3 as depicted in SEQ ID NO: 926, CDR-H1 as depicted in SEQ ID NO: 52, CDR-H2 as depicted in SEQ ID NO: 53, CDR-H3 as depicted in SEQ ID NO: 904, CDR-L1 as depicted in SEQ ID NO: 220, CDR-L2 as depicted in SEQ ID NO: 221 and CDR-L3 as depicted in SEQ ID NO: 926, CDR-H1 as depicted in SEQ ID NO: 1126, CDR-H2 as depicted in SEQ ID NO: 1127, CDR-H3 as depicted in SEQ ID NO: 1128, CDR-L1 as depicted in SEQ ID NO: 1129, CDR-L2 as depicted in SEQ ID NO: 1130 and CDR-L3 as depicted in SEQ ID NO: 1131,
   [0268] CDR-H1 as depicted in SEQ ID NO: 1165, CDR-H2 as depicted in SEQ ID NO: 1166, CDR-H3 as depicted in SEQ ID NO: 1167, CDR-L1 as depicted in SEQ ID NO: 1168, CDR-L2 as depicted in SEQ ID NO: 1169 and CDR-L3 as depicted in SEQ ID NO: 1170,
   [0269] CDR-H1 as depicted in SEQ ID NO: 1334, CDR-H2 as depicted in SEQ ID NO: 1335, CDR-H3 as depicted in SEQ ID NO: 1336, CDR-L1 as depicted in SEQ ID NO: 1337, CDR-L2 as depicted in SEQ ID NO: 1338 and CDR-L3 as depicted in SEQ ID NO: 1339,
   [0270] CDR-H1 as depicted in SEQ ID NO: 1347, CDR-H2 as depicted in SEQ ID NO: 1348, CDR-H3 as depicted in SEQ ID NO: 1349, CDR-L1 as depicted in SEQ ID NO: 1350, CDR-L2 as depicted in SEQ ID NO: 1351 and CDR-L3 as depicted in SEQ ID NO: 1352, and
   [0271] CDR-H1 as depicted in SEQ ID NO: 1360 CDR-H2 as depicted in SEQ ID NO: 1361, CDR-H3 as depicted in SEQ ID NO: 1362, CDR-L1 as depicted in SEQ ID NO: 1363, CDR-L2 as depicted in SEQ ID NO: 1364 and CDR-L3 as depicted in SEQ ID NO: 1365,
   [0272] CDR-H1 as depicted in SEQ ID NO: 1425 CDR-H2 as depicted in SEQ ID NO: 1426, CDR-H3 as depicted in SEQ ID NO: 1427, CDR-L1 as depicted in SEQ ID NO: 1428, CDR-L2 as depicted in SEQ ID NO: 1429 and CDR-L3 as depicted in SEQ ID NO: 1430,
   [0273] CDR-H1 as depicted in SEQ ID NO: 1438 CDR-H2 as depicted in SEQ ID NO: 1439, CDR-H3 as depicted in SEQ ID NO: 1440, CDR-L1 as depicted in SEQ ID NO: 1441, CDR-L2 as depicted in SEQ ID NO: 1442 and CDR-L3 as depicted in SEQ ID NO: 1443;
   [0274] which all characterize binding domains for CDH19 grouped into bin 1;
[0275] (b) CDR-H1 as depicted in SEQ ID NO: 124, CDR-H2 as depicted in SEQ ID NO: 125, CDR-H3 as depicted in SEQ ID NO: 126, CDR-L1 as depicted in SEQ ID NO: 292, CDR-L2 as depicted in SEQ ID NO: 293 and CDR-L3 as depicted in SEQ ID NO: 294, CDR-H1 as depicted in SEQ ID NO: 130, CDR-H2 as depicted in SEQ ID NO: 131, CDR-H3 as depicted in SEQ ID NO: 132, CDR-L1 as depicted in SEQ ID NO: 298, CDR-L2 as depicted in SEQ ID NO: 299 and CDR-L3 as depicted in SEQ ID NO: 300, CDR-H1 as depicted in SEQ ID NO: 136, CDR-H2 as depicted in SEQ ID NO: 137, CDR-H3 as depicted in SEQ ID NO: 138, CDR-L1 as depicted in SEQ ID NO: 304, CDR-L2 as depicted in SEQ ID NO: 305 and CDR-L3 as depicted in SEQ ID NO: 306, CDR-H1 as depicted in SEQ ID NO: 142, CDR-H2 as depicted in SEQ ID NO: 143, CDR-H3 as depicted in SEQ ID NO: 144, CDR-L1 as depicted in SEQ ID NO: 310, CDR-L2 as depicted in SEQ ID NO: 311 and CDR-L3 as depicted in SEQ ID NO: 312, CDR-H1 as depicted in SEQ ID NO: 148, CDR-H2 as depicted in SEQ ID NO: 149, CDR-H3 as depicted in SEQ ID NO: 150, CDR-L1 as depicted in SEQ ID NO: 316, CDR-L2 as depicted in SEQ ID NO: 317 and CDR-L3 as depicted in SEQ ID NO: 318, CDR-H1 as depicted in SEQ ID NO: 166, CDR-H2 as depicted in SEQ ID NO: 167, CDR-H3 as depicted in SEQ ID NO: 168, CDR-L1 as depicted in SEQ ID NO: 334, CDR-L2 as depicted in SEQ ID NO: 335 and CDR-L3 as depicted in SEQ ID NO: 336, CDR-H1 as depicted in SEQ ID NO: 124, CDR-H2 as depicted in SEQ ID NO: 125, CDR-H3 as depicted in SEQ ID NO: 915, CDR-L1 as depicted in SEQ ID NO: 292, CDR-L2 as depicted in SEQ ID NO: 293 and CDR-L3 as depicted in SEQ ID NO: 294, CDR-H1 as depicted in SEQ ID NO: 124, CDR-H2 as depicted in SEQ ID NO: 125, CDR-H3 as depicted in SEQ ID NO: 915, CDR-L1 as depicted in SEQ ID NO: 292, CDR-L2 as depicted in SEQ ID NO: 293 and CDR-L3 as depicted in SEQ ID NO: 928, CDR-H1 as depicted in SEQ ID NO: 124, CDR-H2 as depicted in SEQ ID NO: 125, CDR-H3 as depicted in SEQ ID NO: 915, CDR-L1 as depicted in SEQ ID NO: 292, CDR-L2 as depicted in SEQ ID NO: 293 and CDR-L3 as depicted in SEQ ID NO: 929, CDR-H1 as depicted in SEQ ID NO: 166, CDR-H2 as depicted in SEQ ID NO: 167, CDR-H3 as depicted in SEQ ID NO: 168, CDR-L1 as depicted in SEQ ID NO: 334, CDR-L2 as depicted in SEQ ID NO: 335 and CDR-L3 as depicted in SEQ ID NO: 336, CDR-H1 as depicted in SEQ ID NO: 166, CDR-H2 as depicted in SEQ ID NO: 167, CDR-H3 as depicted in SEQ ID NO: 168, CDR-L1 as depicted in SEQ ID NO: 334, CDR-L2 as depicted in SEQ ID NO: 335 and CDR-L3 as depicted in SEQ ID NO: 942, CDR-H1 as depicted in SEQ ID NO: 166, CDR-H2 as depicted in SEQ ID NO: 167, CDR-H3 as depicted in SEQ ID NO: 168, CDR-L1 as depicted in SEQ ID NO: 334, CDR-L2 as depicted in SEQ ID NO: 335 and CDR-L3 as depicted in SEQ ID NO: 943, CDR-H1 as depicted in SEQ ID NO: 148, CDR-H2 as depicted in SEQ ID NO: 149, CDR-H3 as depicted in SEQ ID NO: 150, CDR-L1 as depicted in SEQ ID NO: 316, CDR-L2 as depicted in SEQ ID NO: 317 and CDR-L3 as depicted in SEQ ID NO: 318, CDR-H1 as depicted in SEQ ID NO: 148, CDR-H2 as depicted in SEQ ID NO: 149, CDR-H3 as depicted in SEQ ID NO: 150, CDR-L1 as depicted in SEQ ID NO: 316, CDR-L2 as depicted in SEQ ID NO: 317 and CDR-L3 as depicted in SEQ ID NO: 937, CDR-H1 as depicted in SEQ ID NO: 148, CDR-H2 as depicted in SEQ ID NO: 149, CDR-H3 as depicted in SEQ ID NO: 150, CDR-L1 as depicted in SEQ ID NO: 316, CDR-L2 as depicted in SEQ ID NO: 317 and CDR-L3 as depicted in SEQ ID NO: 938, CDR-H1 as depicted in SEQ ID NO: 148, CDR-H2 as depicted in SEQ ID NO: 149, CDR-H3 as depicted in SEQ ID NO: 919, CDR-L1 as depicted in SEQ ID NO: 316, CDR-L2 as depicted in SEQ ID NO: 317 and CDR-L3 as depicted in SEQ ID NO: 938, CDR-H1 as depicted in SEQ ID NO: 142, CDR-H2 as depicted in SEQ ID NO: 143, CDR-H3 as depicted in SEQ ID NO: 144, CDR-L1 as depicted in SEQ ID NO: 310, CDR-L2 as depicted in SEQ ID NO: 311 and CDR-L3 as depicted in SEQ ID NO: 935, CDR-H1 as depicted in SEQ ID NO: 142, CDR-H2 as depicted in SEQ ID NO: 143, CDR-H3 as depicted in SEQ ID NO: 918, CDR-L1 as depicted in SEQ ID NO: 310, CDR-L2 as depicted in SEQ ID NO: 311 and CDR-L3 as depicted in SEQ ID NO: 935, CDR-H1 as depicted in SEQ ID NO: 142, CDR-H2 as depicted in SEQ ID NO: 143, CDR-H3 as depicted in SEQ ID NO: 918, CDR-L1 as depicted in SEQ ID NO: 310, CDR-L2 as depicted in SEQ ID NO: 311 and CDR-L3 as depicted in SEQ ID NO: 936, CDR-H1 as depicted in SEQ ID NO: 136, CDR-H2 as depicted in SEQ ID NO: 137, CDR-H3 as depicted in SEQ ID NO: 138, CDR-L1 as depicted in SEQ ID NO: 304, CDR-L2 as depicted in SEQ ID NO: 305 and CDR-L3 as depicted in SEQ ID NO: 933, CDR-H1 as depicted in SEQ ID NO: 136, CDR-H2 as depicted in SEQ ID NO: 137, CDR-H3 as depicted in SEQ ID NO: 917, CDR-L1 as depicted in SEQ ID NO: 304, CDR-L2 as depicted in SEQ ID NO: 305 and CDR-L3 as depicted in SEQ ID NO: 934, CDR-H1 as depicted in SEQ ID NO: 130, CDR-H2 as depicted in SEQ ID NO: 131, CDR-H3 as depicted in SEQ ID NO: 132, CDR-L1 as depicted in SEQ ID NO: 298, CDR-L2 as depicted in SEQ ID NO: 299 and CDR-L3 as depicted in SEQ ID NO: 930, CDR-H1 as depicted in SEQ ID NO: 130, CDR-H2 as depicted in SEQ ID NO: 131, CDR-H3 as depicted in SEQ ID NO: 916, CDR-L1 as depicted in SEQ ID NO: 298, CDR-L2 as depicted in SEQ ID NO: 299 and CDR-L3 as depicted in SEQ ID NO: 931, CDR-H1 as depicted in SEQ ID NO: 130, CDR-H2 as depicted in SEQ ID NO: 131, CDR-H3 as depicted in SEQ ID NO: 916, CDR-L1 as depicted in SEQ ID NO: 298, CDR-L2 as depicted in SEQ ID NO: 299 and CDR-L3 as depicted in SEQ ID NO: 932, CDR-H1 as depicted in SEQ ID NO: 1009, CDR-H2 as depicted in SEQ ID NO: 1010, CDR-H3 as depicted in SEQ ID NO: 1011, CDR-L1 as depicted in SEQ ID NO: 1012, CDR-L2 as depicted in SEQ ID NO: 1013 and CDR-L3 as depicted in SEQ ID NO: 1014,
   [0276] CDR-H1 as depicted in SEQ ID NO: 1022, CDR-H2 as depicted in SEQ ID NO: 1023, CDR-H3 as depicted in SEQ ID NO: 1024, CDR-L1 as depicted in SEQ ID NO: 1025, CDR-L2 as depicted in SEQ ID NO: 1026 and CDR-L3 as depicted in SEQ ID NO: 1027,
   [0277] CDR-H1 as depicted in SEQ ID NO: 1035, CDR-H2 as depicted in SEQ ID NO: 1036, CDR-H3 as depicted in SEQ ID NO: 1037, CDR-L1 as depicted in SEQ ID NO: 1038, CDR-L2 as depicted in SEQ ID NO: 1039 and CDR-L3 as depicted in SEQ ID NO: 1040,
   [0278] CDR-H1 as depicted in SEQ ID NO: 1074, CDR-H2 as depicted in SEQ ID NO: 1075, CDR-H3 as depicted in SEQ ID NO: 1076, CDR-L1 as depicted in SEQ ID NO: 1077, CDR-L2 as depicted in SEQ ID NO: 1078 and CDR-L3 as depicted in SEQ ID NO: 1079,
   [0279] CDR-H1 as depicted in SEQ ID NO: 1100, CDR-H2 as depicted in SEQ ID NO: 1101, CDR-H3 as depicted in SEQ ID NO: 1102, CDR-L1 as depicted in SEQ ID NO: 1103, CDR-L2 as depicted in SEQ ID NO: 1104 and CDR-L3 as depicted in SEQ ID NO: 1105,
   [0280] CDR-H1 as depicted in SEQ ID NO: 1113, CDR-H2 as depicted in SEQ ID NO: 1114, CDR-H3 as depicted in SEQ ID NO: 1115, CDR-L1 as depicted in SEQ ID NO: 1116, CDR-L2 as depicted in SEQ ID NO: 1117 and CDR-L3 as depicted in SEQ ID NO: 1118,
   [0281] CDR-H1 as depicted in SEQ ID NO: 1243, CDR-H2 as depicted in SEQ ID NO: 1244, CDR-H3 as depicted in SEQ ID NO: 1245, CDR-L1 as depicted in SEQ ID NO: 1246, CDR-L2 as depicted in SEQ ID NO: 1247 and CDR-L3 as depicted in SEQ ID NO: 1248,
   [0282] CDR-H1 as depicted in SEQ ID NO: 1256, CDR-H2 as depicted in SEQ ID NO: 1257, CDR-H3 as depicted in SEQ ID NO: 1258, CDR-L1 as depicted in SEQ ID NO: 1259, CDR-L2 as depicted in SEQ ID NO: 1260 and CDR-L3 as depicted in SEQ ID NO: 1261,
   [0283] CDR-H1 as depicted in SEQ ID NO: 1269, CDR-H2 as depicted in SEQ ID NO: 1270, CDR-H3 as depicted in SEQ ID NO: 1271, CDR-L1 as depicted in SEQ ID NO: 1272, CDR-L2 as depicted in SEQ ID NO: 1273 and CDR-L3 as depicted in SEQ ID NO: 1274,
   [0284] CDR-H1 as depicted in SEQ ID NO: 1282, CDR-H2 as depicted in SEQ ID NO: 1283, CDR-H3 as depicted in SEQ ID NO: 1284, CDR-L1 as depicted in SEQ ID NO: 1285, CDR-L2 as depicted in SEQ ID NO: 1286 and CDR-L3 as depicted in SEQ ID NO: 1287, and
   [0285] CDR-H1 as depicted in SEQ ID NO: 1295, CDR-H2 as depicted in SEQ ID NO: 1296, CDR-H3 as depicted in SEQ ID NO: 1297, CDR-L1 as depicted in SEQ ID NO: 1298, CDR-L2 as depicted in SEQ ID NO: 1299 and CDR-L3 as depicted in SEQ ID NO: 1300;
   [0286] which all characterize binding domains for CDH19 grouped into bin 2;
[0287] (c) CDR-H1 as depicted in SEQ ID NO: 94, CDR-H2 as depicted in SEQ ID NO: 95, CDR-H3 as depicted in SEQ ID NO: 96, CDR-L1 as depicted in SEQ ID NO: 262, CDR-L2 as depicted in SEQ ID NO: 263 and CDR-L3 as depicted in SEQ ID NO: 264, CDR-H1 as depicted in SEQ ID NO: 100, CDR-H2 as depicted in SEQ ID NO: 101, CDR-H3 as depicted in SEQ ID NO: 102, CDR-L1 as depicted in SEQ ID NO: 268, CDR-L2 as depicted in SEQ ID NO: 269 and CDR-L3 as depicted in SEQ ID NO: 270, CDR-H1 as depicted in SEQ ID NO: 118, CDR-H2 as depicted in SEQ ID NO: 119, CDR-H3 as depicted in SEQ ID NO: 120, CDR-L1 as depicted in SEQ ID NO: 286, CDR-L2 as depicted in SEQ ID NO: 287 and CDR-L3 as depicted in SEQ ID NO: 288, CDR-H1 as depicted in SEQ ID NO: 154, CDR-H2 as depicted in SEQ ID NO: 155, CDR-H3 as depicted in SEQ ID NO: 156, CDR-L1 as depicted in SEQ ID NO: 322, CDR-L2 as depicted in SEQ ID NO: 323 and CDR-L3 as depicted in SEQ ID NO: 324, CDR-H1 as depicted in SEQ ID NO: 100, CDR-H2 as depicted in SEQ ID NO: 101, CDR-H3 as depicted in SEQ ID NO: 912, CDR-L1 as depicted in SEQ ID NO: 268, CDR-L2 as depicted in SEQ ID NO: 269 and CDR-L3 as depicted in SEQ ID NO: 270, CDR-H1 as depicted in SEQ ID NO: 100, CDR-H2 as depicted in SEQ ID NO: 101, CDR-H3 as depicted in SEQ ID NO: 913, CDR-L1 as depicted in SEQ ID NO: 268, CDR-L2 as depicted in SEQ ID NO: 269 and CDR-L3 as depicted in SEQ ID NO: 270, CDR-H1 as depicted in SEQ ID NO: 94, CDR-H2 as depicted in SEQ ID NO: 95, CDR-H3 as depicted in SEQ ID NO: 910, CDR-L1 as depicted in SEQ ID NO: 262, CDR-L2 as depicted in SEQ ID NO: 263 and CDR-L3 as depicted in SEQ ID NO: 264, CDR-H1 as depicted in SEQ ID NO: 94, CDR-H2 as depicted in SEQ ID NO: 95, CDR-H3 as depicted in SEQ ID NO: 911, CDR-L1 as depicted in SEQ ID NO: 262, CDR-L2 as depicted in SEQ ID NO: 263 and CDR-L3 as depicted in SEQ ID NO: 264, CDR-H1 as depicted in SEQ ID NO: 118, CDR-H2 as depicted in SEQ ID NO: 119, CDR-H3 as depicted in SEQ ID NO: 120, CDR-L1 as depicted in SEQ ID NO: 286, CDR-L2 as depicted in SEQ ID NO: 287 and CDR-L3 as depicted in SEQ ID NO: 288, CDR-H1 as depicted in SEQ ID NO: 118, CDR-H2 as depicted in SEQ ID NO: 914, CDR-H3 as depicted in SEQ ID NO: 120, CDR-L1 as depicted in SEQ ID NO: 286, CDR-L2 as depicted in SEQ ID NO: 287 and CDR-L3 as depicted in SEQ ID NO: 288, CDR-H1 as depicted in SEQ ID NO: 154, CDR-H2 as depicted in SEQ ID NO: 155, CDR-H3 as depicted in SEQ ID NO: 920, CDR-L1 as depicted in SEQ ID NO: 322, CDR-L2 as depicted in SEQ ID NO: 323 and CDR-L3 as depicted in SEQ ID NO: 324, CDR-H1 as depicted in SEQ ID NO: 996, CDR-H2 as depicted in SEQ ID NO: 997, CDR-H3 as depicted in SEQ ID NO: 998, CDR-L1 as depicted in SEQ ID NO: 999, CDR-L2 as depicted in SEQ ID NO: 1000 and CDR-L3 as depicted in SEQ ID NO: 1001,
   [0288] CDR-H1 as depicted in SEQ ID NO: 1048, CDR-H2 as depicted in SEQ ID NO: 1049, CDR-H3 as depicted in SEQ ID NO: 1050, CDR-L1 as depicted in SEQ ID NO: 1051, CDR-L2 as depicted in SEQ ID NO: 1052 and CDR-L3 as depicted in SEQ ID NO: 1053, and
   [0289] CDR-H1 as depicted in SEQ ID NO: 1087, CDR-H2 as depicted in SEQ ID NO: 1088, CDR-H3 as depicted in SEQ ID NO: 1089, CDR-L1 as depicted in SEQ ID NO: 1090, CDR-L2 as depicted in SEQ ID NO: 1091 and CDR-L3 as depicted in SEQ ID NO: 1092;
   [0290] which all characterize binding domains for CDH19 grouped into bin 3;
[0291] (d) CDR-H1 as depicted in SEQ ID NO: 4, CDR-H2 as depicted in SEQ ID NO: 5, CDR-H3 as depicted in SEQ ID NO: 6, CDR-L1 as depicted in SEQ ID NO: 172, CDR-L2 as depicted in SEQ ID NO: 173 and CDR-L3 as depicted in SEQ ID NO: 174, CDR-H1 as depicted in SEQ ID NO: 10, CDR-H2 as depicted in SEQ ID NO: 11, CDR-H3 as depicted in SEQ ID NO: 12, CDR-L1 as depicted in SEQ ID NO: 178, CDR-L2 as depicted in SEQ ID NO: 179 and CDR-L3 as depicted in SEQ ID NO: 180, CDR-H1 as depicted in SEQ ID NO: 28, CDR-H2 as depicted in SEQ ID NO: 29, CDR-H3 as depicted in SEQ ID NO: 30, CDR-L1 as depicted in SEQ ID NO: 196, CDR-L2 as depicted in SEQ ID NO: 197 and CDR-L3 as depicted in SEQ ID NO: 198, CDR-H1 as depicted in SEQ ID NO: 34, CDR-H2 as depicted in SEQ ID NO: 35, CDR-H3 as depicted in SEQ ID NO: 36, CDR-L1 as depicted in SEQ ID NO: 202, CDR-L2 as depicted in SEQ ID NO: 203 and CDR-L3 as depicted in SEQ ID NO: 204, CDR-H1 as depicted in SEQ ID NO: 46, CDR-H2 as depicted in SEQ ID NO: 47, CDR-H3 as depicted in SEQ ID NO: 48, CDR-L1 as depicted in SEQ ID NO: 214, CDR-L2 as depicted in SEQ ID NO: 215 and CDR-L3 as depicted in SEQ ID NO: 216, CDR-H1 as depicted in SEQ ID NO: 58, CDR-H2 as depicted in SEQ ID NO: 59, CDR-H3 as depicted in SEQ ID NO: 60, CDR-L1 as depicted in SEQ ID NO: 226, CDR-L2 as depicted in SEQ ID NO: 227 and CDR-L3 as depicted in SEQ ID NO: 228, CDR-H1 as depicted in SEQ ID NO: 64, CDR-H2 as depicted in SEQ ID NO: 65, CDR-H3 as depicted in SEQ ID NO: 66, CDR-L1 as depicted in SEQ ID NO: 232, CDR-L2 as depicted in SEQ ID NO: 233 and CDR-L3 as depicted in SEQ ID NO: 234, CDR-H1 as depicted in SEQ ID NO: 70, CDR-H2 as depicted in SEQ ID NO: 71, CDR-H3 as depicted in SEQ ID NO: 72, CDR-L1 as depicted in SEQ ID NO: 238, CDR-L2 as depicted in SEQ ID NO: 239 and CDR-L3 as depicted in SEQ ID NO: 240, CDR-H1 as depicted in SEQ ID NO: 160, CDR-H2 as depicted in SEQ ID NO: 161, CDR-H3 as depicted in SEQ ID NO: 162, CDR-L1 as depicted in SEQ ID NO: 328, CDR-L2 as depicted in SEQ ID NO: 329 and CDR-L3 as depicted in SEQ ID NO: 330, CDR-H1 as depicted in SEQ ID NO: 46, CDR-H2 as depicted in SEQ ID NO: 47, CDR-H3 as depicted in SEQ ID NO: 48, CDR-L1 as depicted in SEQ ID NO: 924, CDR-L2 as depicted in SEQ ID NO: 215 and CDR-L3 as depicted in SEQ ID NO: 216, CDR-H1 as depicted in SEQ ID NO: 46, CDR-H2 as depicted in SEQ ID NO: 47, CDR-H3 as depicted in SEQ ID NO: 902, CDR-L1 as depicted in SEQ ID NO: 924, CDR-L2 as depicted in SEQ ID NO: 215 and CDR-L3 as depicted in SEQ ID NO: 216, CDR-H1 as depicted in SEQ ID NO: 46, CDR-H2 as depicted in SEQ ID NO: 47, CDR-H3 as depicted in SEQ ID NO: 903, CDR-L1 as depicted in SEQ ID NO: 924, CDR-L2 as depicted in SEQ ID NO: 215 and CDR-L3 as depicted in SEQ ID NO: 216, CDR-H1 as depicted in SEQ ID NO: 46, CDR-H2 as depicted in SEQ ID NO: 47, CDR-H3 as depicted in SEQ ID NO: 48, CDR-L1 as depicted in SEQ ID NO: 925, CDR-L2 as depicted in SEQ ID NO: 215 and CDR-L3 as depicted in SEQ ID NO: 216, CDR-H1 as depicted in SEQ ID NO: 70, CDR-H2 as depicted in SEQ ID NO: 907, CDR-H3 as depicted in SEQ ID NO: 72, CDR-L1 as depicted in SEQ ID NO: 238, CDR-L2 as depicted in SEQ ID NO: 239 and CDR-L3 as depicted in SEQ ID NO: 240, CDR-H1 as depicted in SEQ ID NO: 70, CDR-H2 as depicted in SEQ ID NO: 907, CDR-H3 as depicted in SEQ ID NO: 908, CDR-L1 as depicted in SEQ ID NO: 238, CDR-L2 as depicted in SEQ ID NO: 239 and CDR-L3 as depicted in SEQ ID NO: 240, CDR-H1 as depicted in SEQ ID NO: 28, CDR-H2 as depicted in SEQ ID NO: 901, CDR-H3 as depicted in SEQ ID NO: 30, CDR-L1 as depicted in SEQ ID NO: 922, CDR-L2 as depicted in SEQ ID NO: 197 and CDR-L3 as depicted in SEQ ID NO: 923, CDR-H1 as depicted in SEQ ID NO: 58, CDR-H2 as depicted in SEQ ID NO: 905, CDR-H3 as depicted in SEQ ID NO: 906, CDR-L1 as depicted in SEQ ID NO: 226, CDR-L2 as depicted in SEQ ID NO: 227 and CDR-L3 as depicted in SEQ ID NO: 228, CDR-H1 as depicted in SEQ ID NO: 58, CDR-H2 as depicted in SEQ ID NO: 905, CDR-H3 as depicted in SEQ ID NO: 60, CDR-L1 as depicted in SEQ ID NO: 226, CDR-L2 as depicted in SEQ ID NO: 227 and CDR-L3 as depicted in SEQ ID NO: 228, CDR-H1 as depicted in SEQ ID NO: 160, CDR-H2 as depicted in SEQ ID NO: 161, CDR-H3 as depicted in SEQ ID NO: 162, CDR-L1 as depicted in SEQ ID NO: 939, CDR-L2 as depicted in SEQ ID NO: 329 and CDR-L3 as depicted in SEQ ID NO: 330, CDR-H1 as depicted in SEQ ID NO: 160, CDR-H2 as depicted in SEQ ID NO: 921, CDR-H3 as depicted in SEQ ID NO: 162, CDR-L1 as depicted in SEQ ID NO: 939, CDR-L2 as depicted in SEQ ID NO: 329 and CDR-L3 as depicted in SEQ ID NO: 940, CDR-H1 as depicted in SEQ ID NO: 160, CDR-H2 as depicted in SEQ ID NO: 161, CDR-H3 as depicted in SEQ ID NO: 162, CDR-L1 as depicted in SEQ ID NO: 941, CDR-L2 as depicted in SEQ ID NO: 329 and CDR-L3 as depicted in SEQ ID NO: 330, CDR-H1 as depicted in SEQ ID NO: 28, CDR-H2 as depicted in SEQ ID NO: 29, CDR-H3 as depicted in SEQ ID NO: 30, CDR-L1 as depicted in SEQ ID NO: 196, CDR-L2 as depicted in SEQ ID NO: 197 and CDR-L3 as depicted in SEQ ID NO: 923, CDR-H1 as depicted in SEQ ID NO: 28, CDR-H2 as depicted in SEQ ID NO: 29, CDR-H3 as depicted in SEQ ID NO: 30, CDR-L1 as depicted in SEQ ID NO: 922, CDR-L2 as depicted in SEQ ID NO: 197 and CDR-L3 as depicted in SEQ ID NO: 923, CDR-H1 as depicted in SEQ ID NO: 28, CDR-H2 as depicted in SEQ ID NO: 901, CDR-H3 as depicted in SEQ ID NO: 30, CDR-L1 as depicted in SEQ ID NO: 922, CDR-L2 as depicted in SEQ ID NO: 197 and CDR-L3 as depicted in SEQ ID NO: 923,
   [0292] CDR-H1 as depicted in SEQ ID NO: 28, CDR-H2 as depicted in SEQ ID NO: 29, CDR-H3 as depicted in SEQ ID NO: 30, CDR-L1 as depicted in SEQ ID NO: 939, CDR-L2 as depicted in SEQ ID NO: 329 and CDR-L3 as depicted in SEQ ID NO: 330,
   [0293] CDR-H1 as depicted in SEQ ID NO: 970, CDR-H2 as depicted in SEQ ID NO: 971, CDR-H3 as depicted in SEQ ID NO: 972, CDR-L1 as depicted in SEQ ID NO: 973, CDR-L2 as depicted in SEQ ID NO: 974 and CDR-L3 as depicted in SEQ ID NO: 975,
   [0294] CDR-H1 as depicted in SEQ ID NO: 1061, CDR-H2 as depicted in SEQ ID NO: 1062, CDR-H3 as depicted in SEQ ID NO: 1063, CDR-L1 as depicted in SEQ ID NO: 1064, CDR-L2 as depicted in SEQ ID NO: 1065 and CDR-L3 as depicted in SEQ ID NO: 1066,
   [0295] CDR-H1 as depicted in SEQ ID NO: 1139, CDR-H2 as depicted in SEQ ID NO: 1140, CDR-H3 as depicted in SEQ ID NO: 1141, CDR-L1 as depicted in SEQ ID NO: 1142, CDR-L2 as depicted in SEQ ID NO: 1143 and CDR-L3 as depicted in SEQ ID NO: 1144,
   [0296] CDR-H1 as depicted in SEQ ID NO: 1152, CDR-H2 as depicted in SEQ ID NO: 1153, CDR-H3 as depicted in SEQ ID NO: 1154, CDR-L1 as depicted in SEQ ID NO: 1155, CDR-L2 as depicted in SEQ ID NO: 1156 and CDR-L3 as depicted in SEQ ID NO: 1157,
   [0297] CDR-H1 as depicted in SEQ ID NO: 1178, CDR-H2 as depicted in SEQ ID NO: 1179, CDR-H3 as depicted in SEQ ID NO: 1180, CDR-L1 as depicted in SEQ ID NO: 1181, CDR-L2 as depicted in SEQ ID NO: 1182 and CDR-L3 as depicted in SEQ ID NO: 1183,
   [0298] CDR-H1 as depicted in SEQ ID NO: 1191, CDR-H2 as depicted in SEQ ID NO: 1192, CDR-H3 as depicted in SEQ ID NO: 1193, CDR-L1 as depicted in SEQ ID NO: 1194, CDR-L2 as depicted in SEQ ID NO: 1195 and CDR-L3 as depicted in SEQ ID NO: 1196,
   [0299] CDR-H1 as depicted in SEQ ID NO: 1204, CDR-H2 as depicted in SEQ ID NO: 1205, CDR-H3 as depicted in SEQ ID NO: 1206, CDR-L1 as depicted in SEQ ID NO: 1207, CDR-L2 as depicted in SEQ ID NO: 1208 and CDR-L3 as depicted in SEQ ID NO: 1209,
   [0300] CDR-H1 as depicted in SEQ ID NO: 1217, CDR-H2 as depicted in SEQ ID NO: 1218, CDR-H3 as depicted in SEQ ID NO: 1219, CDR-L1 as depicted in SEQ ID NO: 1220, CDR-L2 as depicted in SEQ ID NO: 1221 and CDR-L3 as depicted in SEQ ID NO: 1222,
   [0301] CDR-H1 as depicted in SEQ ID NO: 1230, CDR-H2 as depicted in SEQ ID NO: 1231, CDR-H3 as depicted in SEQ ID NO: 1232, CDR-L1 as depicted in SEQ ID NO: 1233, CDR-L2 as depicted in SEQ ID NO: 1234 and CDR-L3 as depicted in SEQ ID NO: 1235,
   [0302] CDR-H1 as depicted in SEQ ID NO: 1308, CDR-H2 as depicted in SEQ ID NO: 1309, CDR-H3 as depicted in SEQ ID NO: 1310, CDR-L1 as depicted in SEQ ID NO: 1311, CDR-L2 as depicted in SEQ ID NO: 1312 and CDR-L3 as depicted in SEQ ID NO: 1313,
   [0303] CDR-H1 as depicted in SEQ ID NO: 1321, CDR-H2 as depicted in SEQ ID NO: 1322, CDR-H3 as depicted in SEQ ID NO: 1323, CDR-L1 as depicted in SEQ ID NO: 1324, CDR-L2 as depicted in SEQ ID NO: 1325 and CDR-L3 as depicted in SEQ ID NO: 1326,
   [0304] CDR-H1 as depicted in SEQ ID NO: 1373, CDR-H2 as depicted in SEQ ID NO: 1374, CDR-H3 as depicted in SEQ ID NO: 1375, CDR-L1 as depicted in SEQ ID NO: 1376, CDR-L2 as depicted in SEQ ID NO: 1377 and CDR-L3 as depicted in SEQ ID NO: 1378,
   [0305] CDR-H1 as depicted in SEQ ID NO: 1386, CDR-H2 as depicted in SEQ ID NO: 1387, CDR-H3 as depicted in SEQ ID NO: 1388, CDR-L1 as depicted in SEQ ID NO: 1389, CDR-L2 as depicted in SEQ ID NO: 1390 and CDR-L3 as depicted in SEQ ID NO: 1391,
   [0306] CDR-H1 as depicted in SEQ ID NO: 1399, CDR-H2 as depicted in SEQ ID NO: 1400, CDR-H3 as depicted in SEQ ID NO: 1401, CDR-L1 as depicted in SEQ ID NO: 1402, CDR-L2 as depicted in SEQ ID NO: 1403 and CDR-L3 as depicted in SEQ ID NO: 1404,
   [0307] CDR-H1 as depicted in SEQ ID NO: 1412, CDR-H2 as depicted in SEQ ID NO: 1413, CDR-H3 as depicted in SEQ ID NO: 1414, CDR-L1 as depicted in SEQ ID NO: 1415, CDR-L2 as depicted in SEQ ID NO: 1416 and CDR-L3 as depicted in SEQ ID NO: 1417;
   [0308] which all characterize binding domains for CDH19 grouped into bin 4; and
[0309] (e) CDR-H1 as depicted in SEQ ID NO: 76, CDR-H2 as depicted in SEQ ID NO: 77, CDR-H3 as depicted in SEQ ID NO: 78, CDR-L1 as depicted in SEQ ID NO: 244, CDR-L2 as depicted in SEQ ID NO: 245 and CDR-L3 as depicted in SEQ ID NO: 246, CDR-H1 as depicted in SEQ ID NO: 88, CDR-H2 as depicted in SEQ ID NO: 89, CDR-H3 as depicted in SEQ ID NO: 90, CDR-L1 as depicted in SEQ ID NO: 256, CDR-L2 as depicted in SEQ ID NO: 257 and CDR-L3 as depicted in SEQ ID NO: 258, CDR-H1 as depicted in SEQ ID NO: 106, CDR-H2 as depicted in SEQ ID NO: 107, CDR-H3 as depicted in SEQ ID NO: 108, CDR-L1 as depicted in SEQ ID NO: 274, CDR-L2 as depicted in SEQ ID NO: 275 and CDR-L3 as depicted in SEQ ID NO: 276, CDR-H1 as depicted in SEQ ID NO: 112, CDR-H2 as depicted in SEQ ID NO: 113, CDR-H3 as depicted in SEQ ID NO: 114, CDR-L1 as depicted in SEQ ID NO: 280, CDR-L2 as depicted in SEQ ID NO: 281 and CDR-L3 as depicted in SEQ ID NO: 282,
   [0310] CDR-H1 as depicted in SEQ ID NO: 106, CDR-H2 as depicted in SEQ ID NO: 107, CDR-H3 as depicted in SEQ ID NO: 108, CDR-L1 as depicted in SEQ ID NO: 274, CDR-L2 as depicted in SEQ ID NO: 275 and CDR-L3 as depicted in SEQ ID NO: 276, and
   [0311] CDR-H1 as depicted in SEQ ID NO: 983, CDR-H2 as depicted in SEQ ID NO: 984, CDR-H3 as depicted in SEQ ID NO: 985, CDR-L1 as depicted in SEQ ID NO: 986, CDR-L2 as depicted in SEQ ID NO: 987 and CDR-L3 as depicted in SEQ ID NO: 988,
[0312] which all characterize binding domains for CDH19 grouped into bin 5.

[0313] In a further embodiment of the antibody construct of the invention the first binding domain comprises a VH region selected from the group consisting of VH regions
[0314] (a) as depicted in SEQ ID NO: 362, SEQ ID NO: 364, SEQ ID NO: 485, SEQ ID NO: 486, SEQ ID NO: 487, SEQ ID NO: 492, SEQ ID NO: 493, SEQ ID NO: 494, SEQ ID NO: 495, SEQ ID NO: 1133, SEQ ID NO: 1172, SEQ ID NO: 1341, SEQ ID NO: 1354, SEQ ID NO: 1367, SEQ ID NO: 1432, and SEQ ID NO: 1445;
   [0315] grouped into bin 1;
[0316] (b) as depicted in SEQ ID NO: 342, SEQ ID NO: 366, SEQ ID NO: 370, SEQ ID NO: 344, SEQ ID NO: 372, SEQ ID NO: 368, SEQ ID NO: 496, SEQ ID NO: 497, SEQ ID NO: 498, SEQ ID NO: 499, SEQ ID NO: 500, SEQ ID NO: 508, SEQ ID NO: 509, SEQ ID NO: 510, SEQ ID NO: 511, SEQ ID NO: 512, SEQ ID NO: 519, SEQ ID NO: 520, SEQ ID NO: 521, SEQ ID NO: 522, SEQ ID NO: 523, SEQ ID NO: 524, SEQ ID NO: 525, SEQ ID NO: 526, SEQ ID NO: 527, SEQ ID NO: 528, SEQ ID NO: 529, SEQ ID NO: 530, SEQ ID NO: 531, SEQ ID NO: 532, SEQ ID NO: 533, SEQ ID NO: 534, SEQ ID NO: 535, SEQ ID NO: 536, SEQ ID NO: 537, SEQ ID NO: 538, SEQ ID NO: 1016, SEQ ID NO: 1029, SEQ ID NO: 1042, SEQ ID NO: 1081, SEQ ID NO: 1107, SEQ ID NO: 1120, SEQ ID NO: 1250, SEQ ID NO: 1263, SEQ ID NO: 1276, SEQ ID NO: 1289, and SEQ ID NO: 1302;
   [0317] grouped into bin 2;
[0318] (c) as depicted in SEQ ID NO: 338, SEQ ID NO: 354, SEQ ID NO: 378, SEQ ID NO: 356, SEQ ID NO: 476, SEQ ID NO: 477, SEQ ID NO: 478, SEQ ID NO: 479, SEQ ID NO: 480, SEQ ID NO: 481, SEQ ID NO: 482, SEQ ID NO: 483, SEQ ID NO: 484, SEQ ID NO: 501, SEQ ID NO: 502, SEQ ID NO: 503, SEQ ID NO: 504, SEQ ID NO: 505, SEQ ID NO: 506, SEQ ID NO: 517, SEQ ID NO: 518, SEQ ID NO: 1003, SEQ ID NO: 1055, and SEQ ID NO: 1094;
   [0319] grouped into bin 3;
[0320] (d) as depicted in SEQ ID NO: 352, SEQ ID NO: 360, SEQ ID NO: 388, SEQ ID NO: 386, SEQ ID NO: 340, SEQ ID NO: 346, SEQ ID NO: 374, SEQ ID NO: 348, SEQ ID NO: 390, SEQ ID NO: 463, SEQ ID NO: 464, SEQ ID NO: 465, SEQ ID NO: 466, SEQ ID NO: 467, SEQ ID NO: 468, SEQ ID NO: 469, SEQ ID NO: 470, SEQ ID NO: 471, SEQ ID NO: 472, SEQ ID NO: 473, SEQ ID NO: 474, SEQ ID NO: 475, SEQ ID NO: 488, SEQ ID NO: 489, SEQ ID NO: 490, SEQ ID NO: 491, SEQ ID NO: 513, SEQ ID NO: 514, SEQ ID NO: 515, SEQ ID NO: 516, SEQ ID NO: 540, SEQ ID NO: 541, SEQ ID NO: 542, SEQ ID NO: 543, SEQ ID NO: 977, SEQ ID NO: 1068, SEQ ID NO: 1146, SEQ ID NO: 1159, SEQ ID NO: 1185, SEQ ID NO: 1198, SEQ ID NO: 1211, SEQ ID NO: 1224, SEQ ID NO: 1237, SEQ ID NO: 1315, SEQ ID NO: 1328, SEQ ID NO: 1380, SEQ ID NO: 1393, SEQ ID NO: 1406, and SEQ ID NO: 1419;
   [0321] grouped into bin 4; and
[0322] (e) as depicted in SEQ ID NO: 376, SEQ ID NO: 392, SEQ ID NO: 358, SEQ ID NO: 350, SEQ ID NO: 507, and SEQ ID NO: 990
   [0323] grouped into bin 5.

[0324] In another embodiment of the antibody construct of the invention the first binding domain comprises a VL region selected from the group consisting of VL regions
[0325] (a) as depicted in SEQ ID NO: 418, SEQ ID NO: 420, SEQ ID NO: 580, SEQ ID NO: 581, SEQ ID NO: 582, SEQ ID NO: 587, SEQ ID NO: 588, SEQ ID NO: 589, SEQ ID NO: 590, SEQ ID NO: 1135, SEQ ID NO: 1174, SEQ ID NO: 1343, SEQ ID NO: 1356, SEQ ID NO: 1369, SEQ ID NO: 1434, and SEQ ID NO: 1447;
   [0326] grouped into bin 1;
[0327] (b) as depicted in SEQ ID NO: 398, SEQ ID NO: 422, SEQ ID NO: 426, SEQ ID NO: 400, SEQ ID NO: 428, SEQ ID NO: 424, SEQ ID NO: 591, SEQ ID NO: 592, SEQ ID NO: 593, SEQ ID NO: 594, SEQ ID NO: 595, SEQ ID NO: 603, SEQ ID NO: 604, SEQ ID NO: 605, SEQ ID NO: 606, SEQ ID NO: 607, SEQ ID NO: 614, SEQ ID NO: 615, SEQ ID NO: 616, SEQ ID NO: 617, SEQ ID NO: 618, SEQ ID NO: 619, SEQ ID NO: 620, SEQ ID NO: 621, SEQ ID NO: 622, SEQ ID NO: 623, SEQ ID NO: 624, SEQ ID NO: 625, SEQ ID NO: 626, SEQ ID NO: 627, SEQ ID NO: 628, SEQ ID NO: 629, SEQ ID NO: 630, SEQ ID NO: 631, SEQ ID NO: 632, SEQ ID NO: 633, SEQ ID NO: 1018, SEQ ID NO: 1031, SEQ ID NO: 1044, SEQ ID NO: 1083, SEQ ID NO: 1109, SEQ ID NO: 1122, SEQ ID NO: 1252, SEQ ID NO: 1265, SEQ ID NO: 1278, SEQ ID NO: 1291, and SEQ ID NO: 1304;
   [0328] grouped into bin 2;
[0329] (c) as depicted in SEQ ID NO: 394, SEQ ID NO: 410, SEQ ID NO: 434, SEQ ID NO: 412, SEQ ID NO: 571, SEQ ID NO: 572, SEQ ID NO: 573, SEQ ID NO: 574, SEQ ID NO: 575, SEQ ID NO: 576, SEQ ID NO: 577, SEQ ID NO: 578, SEQ ID NO: 579, SEQ ID NO: 596, SEQ ID NO: 597, SEQ ID NO: 598, SEQ ID NO: 599, SEQ ID NO: 600, SEQ ID NO: 601, SEQ ID NO: 612, SEQ ID NO: 613, SEQ ID NO: 1005, SEQ ID NO: 1057, and SEQ ID NO: 1096;
   [0330] grouped into bin 3;
[0331] (d) as depicted in SEQ ID NO: 408, SEQ ID NO: 416, SEQ ID NO: 444, SEQ ID NO: 442, SEQ ID NO: 396, SEQ ID NO: 402, SEQ ID NO: 430, SEQ ID NO: 404, SEQ ID NO: 446, SEQ ID NO: 558, SEQ ID NO: 559, SEQ ID NO: 560, SEQ ID NO: 561, SEQ ID NO: 562, SEQ ID NO: 563, SEQ ID NO: 564, SEQ ID NO: 565, SEQ ID NO: 566, SEQ ID NO: 567, SEQ ID NO: 568, SEQ ID NO: 569, SEQ ID NO: 570, SEQ ID NO: 583, SEQ ID NO: 584, SEQ ID NO: 585, SEQ ID NO: 586, SEQ ID NO: 608, SEQ ID NO: 609, SEQ ID NO: 610, SEQ ID NO: 611, SEQ ID NO: 635, SEQ ID NO: 636, SEQ ID NO: 637, SEQ ID NO: 638, SEQ ID NO: 979, SEQ ID NO: 1070, SEQ ID NO: 1148, SEQ ID NO: 1161, SEQ ID NO: 1187, SEQ ID NO: 1200, SEQ ID NO: 1213, SEQ ID NO: 1226, SEQ ID NO: 1239, SEQ ID NO: 1317, SEQ ID NO: 1330, SEQ ID NO: 1382, SEQ ID NO: 1395, SEQ ID NO: 1408, and SEQ ID NO: 1421
   [0332] grouped into bin 4; and
[0333] (e) as depicted in SEQ ID NO: 432, SEQ ID NO: 448, SEQ ID NO: 414, SEQ ID NO: 406, SEQ ID NO: 602, and SEQ ID NO: 992
   [0334] grouped into bin 5.

[0335] The invention further provides an embodiment of the antibody construct of the invention, wherein the first binding domain comprises a VH region and a VL region selected from the group consisting of:
[0336] (1) pairs of a VH region and a VL region as depicted in SEQ ID NOs: 362+418, SEQ ID NOs: 364+420, SEQ ID NOs: 485+580, SEQ ID NOs: 486+581, SEQ ID NOs: 487+582, SEQ ID NOs: 492+587, SEQ ID NOs: 493+588, SEQ ID NOs: 494+589, SEQ ID NOs: 495+590, SEQ ID NOs: 1133+1135, SEQ ID NOs: 1172+1174, SEQ ID NOs: 1341+1343, SEQ ID NOs: 1354+1356, SEQ ID NOs: 1367+1369, SEQ ID NOs: 1432+1434, and SEQ ID NOs: 1445+1447;
   [0337] all pairs grouped into bin 1;
[0338] (2) pairs of a VH region and a VL region as depicted in SEQ ID NOs: 342+398, SEQ ID NOs: 366+422, SEQ ID NOs: 370+426, SEQ ID NOs: 344+400, SEQ ID NOs: 372+428, SEQ ID NOs: 368+424, SEQ ID NOs: 496+591, SEQ ID NOs: 497+592, SEQ ID NOs: 498+593, SEQ ID NOs: 499+594, SEQ ID NOs: 500+595, SEQ ID NOs: 508+603, SEQ ID NOs: 509+604, SEQ ID NOs: 510+605, SEQ ID NOs: 511+606, SEQ ID NOs: 512+607, SEQ ID NOs: 519+614, SEQ ID NOs: 520+615, SEQ ID NOs: 521+616, SEQ ID NOs: 522+617, SEQ ID NOs: 523+618, SEQ ID NOs: 524+619, SEQ ID NOs: 525+620, SEQ ID NOs: 526+621, SEQ ID NOs: 527+622, SEQ ID NOs: 528+623, SEQ ID NOs: 529+624, SEQ ID NOs: 530+625, SEQ ID NOs: 531+626, SEQ ID NOs: 532+627, SEQ ID NOs: 533+628, SEQ ID NOs: 534+629, SEQ ID NOs: 535+630, SEQ ID NOs: 536+631, SEQ ID NOs: 537+632, SEQ ID NOs: 538+633, SEQ ID NOs: 1016+1018, SEQ ID NOs: 1029+1031, SEQ ID NOs: 1042+1044, SEQ ID NOs: 1081+1083, SEQ ID NOs: 1107+1109, SEQ ID NOs: 1120+1122, SEQ ID NOs: 1250+1252, SEQ ID NOs: 1263+1265, SEQ ID NOs: 1276+1278, SEQ ID NOs: 1289+1291, and SEQ ID NOs: 1302+1304;
   [0339] all pairs grouped into bin 2;
[0340] (3) pairs of a VH region and a VL region as depicted in SEQ ID NOs: 338+394, SEQ ID NOs: 354+410, SEQ ID NOs: 378+434, SEQ ID NOs: 356+412, SEQ ID NOs: 476+571, SEQ ID NOs: 477+572, SEQ ID NOs: 478+573, SEQ ID NOs: 479+574, SEQ ID NOs: 480+575, SEQ ID NOs: 481+576, SEQ ID NOs: 482+577, SEQ ID NOs: 483+578, SEQ ID NOs: 484+579, SEQ ID NOs: 501+596, SEQ ID NOs: 502+597, SEQ ID NOs: 503+598, SEQ ID NOs: 504+599, SEQ ID NOs: 505+600, SEQ ID NOs: 506+601, SEQ ID NOs: 517+612, SEQ ID NOs: 518+613, SEQ ID NOs: 1003+1005, SEQ ID NOs: 1055+1057, and SEQ ID NOs: 1094+1096;
   [0341] all pairs grouped into bin 3;
[0342] (4) pairs of a VH region and a VL region as depicted in SEQ ID NOs: 352+408, SEQ ID NOs: 360+416, SEQ ID NOs: 388+444, SEQ ID NOs: 386+442, SEQ ID NOs: 340+396, SEQ ID NOs: 346+402, SEQ ID NOs: 374+430, SEQ ID NOs: 348+404, SEQ ID NOs: 390+446, SEQ ID NOs: 463+558, SEQ ID NOs: 464+559, SEQ ID NOs: 465+560, SEQ ID NOs: 466+561, SEQ ID NOs: 467+562, SEQ ID NOs: 468+563, SEQ ID NOs: 469+564, SEQ ID NOs: 470+565, SEQ ID NOs: 471+566, SEQ ID NOs: 472+567, SEQ ID NOs: 473+568, SEQ ID NOs: 474+569, SEQ ID NOs: 475+570, SEQ ID NOs: 488+583, SEQ ID NOs: 489+584, SEQ ID NOs: 490+585, SEQ ID NOs: 491+586, SEQ ID NOs: 513+608, SEQ ID NOs: 514+609, SEQ ID NOs: 515+610, SEQ ID NOs: 516+611, SEQ ID NOs: 540+635, SEQ ID NOs: 541+636, SEQ ID NOs: 542+637, SEQ ID NOs: 543+638, SEQ ID NOs: 977+979, SEQ ID NOs: 1068+1070, SEQ ID NOs: 1146+1148, SEQ ID NOs: 1159+1161, SEQ ID NOs: 1185+1187, SEQ ID NOs: 1198+1200, SEQ ID NOs: 1211+1213, SEQ ID NOs: 1224+1226, SEQ ID NOs: 1237+1239, SEQ ID NOs: 1315+1317, SEQ ID NOs: 1328+1330, SEQ ID NOs: 1380,+1382 SEQ ID NOs: 1393+1395, SEQ ID NOs: 1406+1408, and SEQ ID NOs: 1419+1421;
   [0343] all pairs grouped into bin 4; and
[0344] (5) pairs of a VH region and a VL region as depicted in SEQ ID NOs: 376+432, SEQ ID NOs: 392+448, SEQ ID NOs: 358+414, SEQ ID NOs: 350+406, SEQ ID NOs: 507+602, and SEQ ID NOs: 990+992
   [0345] all pairs grouped into bin 5.

[0346] In a further embodiment of the invention the antibody construct is in a format selected from the group consisting of (scFv)₂, (single domain mAb)₂, scFv-single domain mAb, diabodies and oligomers thereof.

[0347] In a preferred embodiment the first binding domain comprises an amino acid selected from the group consisting of
[0348] (a) as depicted in SEQ ID NO: 117, SEQ ID NO: 1137, SEQ ID NO: 1176, SEQ ID NO: 1345, SEQ ID NO: 1358, SEQ ID NO: 1371, SEQ ID NO: 1436, and SEQ ID NO: 1449;
   [0349] all binders grouped into bin 1;
[0350] (b) as depicted in SEQ ID NO: 1020, SEQ ID NO: 1033, SEQ ID NO: 1046, SEQ ID NO: 1085, SEQ ID NO: 1111, SEQ ID NO: 1124, SEQ ID NO: 1254, SEQ ID NO: 1267, SEQ ID NO: 1280, SEQ ID NO: 1293, and SEQ ID NO: 1306;
   [0351] all binders grouped into bin 2;
[0352] (c) as depicted in SEQ ID NO: 1007, SEQ ID NO: 1059, and SEQ ID NO: 1098;
   [0353] all binders grouped into bin 3;
[0354] (d) as depicted in SEQ ID NO: 981, SEQ ID NO: 1072, SEQ ID NO: 1150, SEQ ID NO: 1163, SEQ ID NO: 1189, SEQ ID NO: 1202, SEQ ID NO: 1215, SEQ ID NO: 1228, SEQ ID NO: 1241, SEQ ID NO: 1319, SEQ ID NO: 1332, SEQ ID NO: 1384, SEQ ID NO: 1397, SEQ ID NO: 1410, and SEQ ID NO: 1423;
   [0355] all binders grouped into bin 4; and
[0356] (e) as depicted in SEQ ID NO: 994 grouped into bin 5.

[0357] In one aspect of the invention, the second binding domain is capable of binding to human CD3 and to macaque CD3, preferably to human CD3 epsilon and to macaque CD3 epsilon. Additionally or alternatively, the second binding domain is capable of binding to Callithrix jacchus, Saguinus oedipus and/or Saimiri sciureus CD3 epsilon. According to these embodiments, one or both binding domains of the antibody construct of the invention are preferably cross-species specific for members of the mammalian order of primates. Cross-species specific CD3 binding domains are, for example, described in WO 2008/119567.

[0358] It is particularly preferred for the antibody construct of the present invention that the second binding domain capable of binding to the T cell CD3 receptor complex comprises a VL region comprising CDR-L1, CDR-L2 and CDR-L3 selected from:
[0359] (a) CDR-L1 as depicted in SEQ ID NO: 27 of WO 2008/119567, CDR-L2 as depicted in SEQ ID NO: 28 of WO 2008/119567 and CDR-L3 as depicted in SEQ ID NO: 29 of WO 2008/119567;
[0360] (b) CDR-L1 as depicted in SEQ ID NO: 117 of WO 2008/119567, CDR-L2 as depicted in SEQ ID NO: 118 of WO 2008/119567 and CDR-L3 as depicted in SEQ ID NO: 119 of WO 2008/119567; and
[0361] (c) CDR-L1 as depicted in SEQ ID NO: 153 of WO 2008/119567, CDR-L2 as depicted in SEQ ID NO: 154 of WO 2008/119567 and CDR-L3 as depicted in SEQ ID NO: 155 of WO 2008/119567.

[0362] In an alternatively preferred embodiment of the antibody construct of the present invention, the second binding domain capable of binding to the T cell CD3 receptor complex comprises a VH region comprising CDR-H 1, CDR-H2 and CDR-H3 selected from:
[0363] (a) CDR-H1 as depicted in SEQ ID NO: 12 of WO 2008/119567, CDR-H2 as depicted in SEQ ID NO: 13 of WO 2008/119567 and CDR-H3 as depicted in SEQ ID NO: 14 of WO 2008/119567;
[0364] (b) CDR-H1 as depicted in SEQ ID NO: 30 of WO 2008/119567, CDR-H2 as depicted in SEQ ID NO: 31 of WO 2008/119567 and CDR-H3 as depicted in SEQ ID NO: 32 of WO 2008/119567;
[0365] (c) CDR-H1 as depicted in SEQ ID NO: 48 of WO 2008/119567, CDR-H2 as depicted in SEQ ID NO: 49 of WO 2008/119567 and CDR-H3 as depicted in SEQ ID NO: 50 of WO 2008/119567;
[0366] (d) CDR-H1 as depicted in SEQ ID NO: 66 of WO 2008/119567, CDR-H2 as depicted in SEQ ID NO: 67 of WO 2008/119567 and CDR-H3 as depicted in SEQ ID NO: 68 of WO 2008/119567;
[0367] (e) CDR-H1 as depicted in SEQ ID NO: 84 of WO 2008/119567, CDR-H2 as depicted in SEQ ID NO: 85 of WO 2008/119567 and CDR-H3 as depicted in SEQ ID NO: 86 of WO 2008/119567;
[0368] (f) CDR-H1 as depicted in SEQ ID NO: 102 of WO 2008/119567, CDR-H2 as depicted in SEQ ID NO: 103 of WO 2008/119567 and CDR-H3 as depicted in SEQ ID NO: 104 of WO 2008/119567;
[0369] (g) CDR-H1 as depicted in SEQ ID NO: 120 of WO 2008/119567, CDR-H2 as depicted in SEQ ID NO: 121 of WO 2008/119567 and CDR-H3 as depicted in SEQ ID NO: 122 of WO 2008/119567;
[0370] (h) CDR-H1 as depicted in SEQ ID NO: 138 of WO 2008/119567, CDR-H2 as depicted in SEQ ID NO: 139 of WO 2008/119567 and CDR-H3 as depicted in SEQ ID NO: 140 of WO 2008/119567;
[0371] (i) CDR-H1 as depicted in SEQ ID NO: 156 of WO 2008/119567, CDR-H2 as depicted in SEQ ID NO: 157 of WO 2008/119567 and CDR-H3 as depicted in SEQ ID NO: 158 of WO 2008/119567; and
[0372] (j) CDR-H1 as depicted in SEQ ID NO: 174 of WO 2008/119567, CDR-H2 as depicted in SEQ ID NO: 175 of WO 2008/119567 and CDR-H3 as depicted in SEQ ID NO: 176 of WO 2008/119567.

[0373] It is further preferred for the antibody construct of the present invention that the second binding domain capable of binding to the T cell CD3 receptor complex comprises a VL region selected from the group consisting of a VL region as depicted in SEQ ID NO: 35, 39, 125, 129, 161 or 165 of WO 2008/119567.

[0374] It is alternatively preferred that the second binding domain capable of binding to the T cell CD3 receptor complex comprises a VH region selected from the group consisting of a VH region as depicted in SEQ ID NO: 15, 19, 33, 37, 51, 55, 69, 73, 87, 91, 105, 109, 123, 127, 141, 145, 159, 163, 177 or 181 of WO 2008/119567.

[0375] More preferably, the antibody construct of the present invention is characterized by the second binding domain capable of binding to the T cell CD3 receptor complex comprising a VL region and a VH region selected from the group consisting of:
[0376] (a) a VL region as depicted in SEQ ID NO: 17 or 21 of WO 2008/119567 and a VH region as depicted in SEQ ID NO: 15 or 19 of WO 2008/119567;
[0377] (b) a VL region as depicted in SEQ ID NO: 35 or 39 of WO 2008/119567 and a VH region as depicted in SEQ ID NO: 33 or 37 of WO 2008/119567;
[0378] (c) a VL region as depicted in SEQ ID NO: 53 or 57 of WO 2008/119567 and a VH region as depicted in SEQ ID NO: 51 or 55 of WO 2008/119567;
[0379] (d) a VL region as depicted in SEQ ID NO: 71 or 75 of WO 2008/119567 and a VH region as depicted in SEQ ID NO: 69 or 73 of WO 2008/119567;
[0380] (e) a VL region as depicted in SEQ ID NO: 89 or 93 of WO 2008/119567 and a VH region as depicted in SEQ ID NO: 87 or 91 of WO 2008/119567;
[0381] (f) a VL region as depicted in SEQ ID NO: 107 or 111 of WO 2008/119567 and a VH region as depicted in SEQ ID NO: 105 or 109 of WO 2008/119567;
[0382] (g) a VL region as depicted in SEQ ID NO: 125 or 129 of WO 2008/119567 and a VH region as depicted in SEQ ID NO: 123 or 127 of WO 2008/119567;
[0383] (h) a VL region as depicted in SEQ ID NO: 143 or 147 of WO 2008/119567 and a VH region as depicted in SEQ ID NO: 141 or 145 of WO 2008/119567;
[0384] (i) a VL region as depicted in SEQ ID NO: 161 or 165 of WO 2008/119567 and a VH region as depicted in SEQ ID NO: 159 or 163 of WO 2008/119567; and
[0385] (j) a VL region as depicted in SEQ ID NO: 179 or 183 of WO 2008/119567 and a VH region as depicted in SEQ ID NO: 177 or 181 of WO 2008/119567.

[0386] According to a preferred embodiment of the antibody construct of the present invention, in particular the second binding domain capable of binding to the T cell CD3 receptor complex, the pairs of VH-regions and VL-regions are in the format of a single chain antibody (scFv). The VH and VL regions are arranged in the order VH-VL or VL-VH. It is preferred that the VH-region is positioned N-terminally to a linker sequence. The VL-region is positioned C-terminally of the linker sequence.

[0387] A preferred embodiment of the above described antibody construct of the present invention is characterized by the second binding domain capable of binding to the T cell CD3 receptor complex comprising an amino acid sequence selected from the group consisting of SEQ ID NOs: 23, 25, 41, 43, 59, 61, 77, 79, 95, 97, 113, 115, 131, 133, 149, 151, 167, 169, 185 or 187 of WO 2008/119567.

[0388] In a preferred embodiment the antibody construct of the invention has an amino acid sequence selected from the group consisting of
[0389] (a) as depicted in SEQ ID NO: 1138, SEQ ID NO: 1177, SEQ ID NO: 1346, SEQ ID NO: 1359, SEQ ID NO: 1372, SEQ ID NO: 1437, and SEQ ID NO: 1450;
[0390] (b) as depicted in SEQ ID NO: 1021, SEQ ID NO: 1034, SEQ ID NO: 1047, SEQ ID NO: 1086, SEQ ID NO: 1112, SEQ ID NO: 1125, SEQ ID NO: 1255, SEQ ID NO: 1268, SEQ ID NO: 1281, SEQ ID NO: 1294, and SEQ ID NO: 1307;
[0391] (c) as depicted in SEQ ID NO: 1008, SEQ ID NO: 1060, and SEQ ID NO: 1099;
[0392] (d) as depicted in SEQ ID NO: 982, SEQ ID NO: 1073, SEQ ID NO: 1151, SEQ ID NO: 1164, SEQ ID NO: 1190, SEQ ID NO: 1203, SEQ ID NO: 1216, SEQ ID NO: 1229, SEQ ID NO: 1242, SEQ ID NO: 1320, SEQ ID NO: 1333, SEQ ID NO: 1385, SEQ ID NO: 1398, SEQ ID NO: 1411, and SEQ ID NO: 1424; and
[0393] (e) as depicted in SEQ ID NO: 995.

[0394] The invention further provides a nucleic acid sequence encoding an antibody construct of the invention.

[0395] Furthermore, the invention provides a vector comprising a nucleic acid sequence of the invention. Moreover, the invention provides a host cell transformed or transfected with the nucleic acid sequence of the invention.

[0396] In a further embodiment the invention provides a process for the production of a antibody construct of the invention, said process comprising culturing a host cell of the invention under conditions allowing the expression of the antibody construct of the invention and recovering the produced antibody construct from the culture.

[0397] Moreover, the invention provides a pharmaceutical composition comprising an antibody construct of the invention or produced according to the process of the invention

[0398] The formulations described herein are useful as pharmaceutical compositions in the treatment, amelioration and/or prevention of the pathological medical condition as described herein in a patient in need thereof. The term “treatment” refers to both therapeutic treatment and prophylactic or preventative measures. Treatment includes the application or administration of the formulation to the body, an isolated tissue, or cell from a patient who has a disease/disorder, a symptom of a disease/disorder, or a predisposition toward a disease/disorder, with the purpose to cure, heal, alleviate, relieve, alter, remedy, ameliorate, improve, or affect the disease, the symptom of the disease, or the predisposition toward the disease.

[0399] Those “in need of treatment” include those already with the disorder, as well as those in which the disorder is to be prevented. The term “disease” is any condition that would benefit from treatment with the protein formulation described herein. This includes chronic and acute disorders or diseases including those pathological conditions that predispose the mammal to the disease in question. Non-limiting examples of diseases/disorders to be treated herein include proliferative disease, a tumorous disease, or an immunological disorder.

[0400] In some embodiments, the invention provides a pharmaceutical composition comprising a therapeutically effective amount of one or a plurality of the antibody construct of the invention together with a pharmaceutically effective diluents, carrier, solubilizer, emulsifier, preservative, and/or adjuvant. Pharmaceutical compositions of the invention include, but are not limited to, liquid, frozen, and lyophilized compositions.

[0401] Preferably, formulation materials are nontoxic to recipients at the dosages and concentrations employed. In specific embodiments, pharmaceutical compositions comprising a therapeutically effective amount of an antibody construct of the invention.

[0402] In certain embodiments, the pharmaceutical composition may contain formulation materials for modifying, maintaining or preserving, for example, the pH, osmolarity, viscosity, clarity, color, isotonicity, odor, sterility, stability, rate of dissolution or release, adsorption or penetration of the composition. In such embodiments, suitable formulation materials include, but are not limited to, amino acids (such as glycine, glutamine, asparagine, arginine, proline, or lysine); antimicrobials; antioxidants (such as ascorbic acid, sodium sulfite or sodium hydrogen-sulfite); buffers (such as borate, bicarbonate, Tris-HCl, citrates, phosphates or other organic acids); bulking agents (such as mannitol or glycine); chelating agents (such as ethylenediamine tetraacetic acid (EDTA)); complexing agents (such as caffeine, polyvinylpyrrolidone, beta-cyclodextrin or hydroxypropyl-beta-cyclodextrin); fillers; monosaccharides; disaccharides; and other carbohydrates (such as glucose, mannose or dextrins); proteins (such as serum albumin, gelatin or immunoglobulins); coloring, flavoring and diluting agents; emulsifying agents; hydrophilic polymers (such as polyvinylpyrrolidone); low molecular weight polypeptides; salt-forming counterions (such as sodium); preservatives (such as benzalkonium chloride, benzoic acid, salicylic acid, thimerosal, phenethyl alcohol, methylparaben, propylparaben, chlorhexidine, sorbic acid or hydrogen peroxide); solvents (such as glycerin, propylene glycol or polyethylene glycol); sugar alcohols (such as mannitol or sorbitol); suspending agents; surfactants or wetting agents (such as pluronics, PEG, sorbitan esters, polysorbates such as polysorbate 20, polysorbate, triton, tromethamine, lecithin, cholesterol, tyloxapal); stability enhancing agents (such as sucrose or sorbitol); tonicity enhancing agents (such as alkali metal halides, preferably sodium or potassium chloride, mannitol sorbitol); delivery vehicles; diluents; excipients and/or pharmaceutical adjuvants. See, REMINGTON'S PHARMACEUTICAL SCIENCES, 18″ Edition, (A. R. Genrmo, ed.), 1990, Mack Publishing Company.

[0403] In certain embodiments, the optimal pharmaceutical composition will be determined by one skilled in the art depending upon, for example, the intended route of administration, delivery format and desired dosage. See, for example, REMINGTON′S PHARMACEUTICAL SCIENCES, supra. In certain embodiments, such compositions may influence the physical state, stability, rate of in vivo release and rate of in vivo clearance of the antigen binding proteins of the invention. In certain embodiments, the primary vehicle or carrier in a pharmaceutical composition may be either aqueous or non-aqueous in nature. For example, a suitable vehicle or carrier may be water for injection, physiological saline solution or artificial cerebrospinal fluid, possibly supplemented with other materials common in compositions for parenteral administration. Neutral buffered saline or saline mixed with serum albumin are further exemplary vehicles. In specific embodiments, pharmaceutical compositions comprise Tris buffer of about pH 7.0-8.5, or acetate buffer of about pH 4.0-5.5, and may further include sorbitol or a suitable substitute therefore. In certain embodiments of the invention, human antibody or antigen binding fragment thereof of the invention or the antibody construct of the invention compositions may be prepared for storage by mixing the selected composition having the desired degree of purity with optional formulation agents (REMINGTON′S PHARMACEUTICAL SCIENCES, supra) in the form of a lyophilized cake or an aqueous solution. Further, in certain embodiments, the human antibody or antigen binding fragment thereof of the invention or the antibody construct of the invention may be formulated as a lyophilizate using appropriate excipients such as sucrose.

[0404] The pharmaceutical compositions of the invention can be selected for parenteral delivery. Alternatively, the compositions may be selected for inhalation or for delivery through the digestive tract, such as orally. Preparation of such pharmaceutically acceptable compositions is within the skill of the art. The formulation components are present preferably in concentrations that are acceptable to the site of administration. In certain embodiments, buffers are used to maintain the composition at physiological pH or at a slightly lower pH, typically within a pH range of from about 5 to about 8.

[0405] When parenteral administration is contemplated, the therapeutic compositions for use in this invention may be provided in the form of a pyrogen-free, parenterally acceptable aqueous solution comprising the desired human antibody or antigen binding fragment thereof of the invention or the antibody construct of the invention in a pharmaceutically acceptable vehicle. A particularly suitable vehicle for parenteral injection is sterile distilled water in which the antibody construct of the invention is formulated as a sterile, isotonic solution, properly preserved. In certain embodiments, the preparation can involve the formulation of the desired molecule with an agent, such as injectable microspheres, bio-erodible particles, polymeric compounds (such as polylactic acid or polyglycolic acid), beads or liposomes, that may provide controlled or sustained release of the product which can be delivered via depot injection. In certain embodiments, hyaluronic acid may also be used, having the effect of promoting sustained duration in the circulation. In certain embodiments, implantable drug delivery devices may be used to introduce the desired antigen binding protein.

[0406] Additional pharmaceutical compositions will be evident to those skilled in the art, including formulations involving h the antibody construct of the invention in sustained- or controlled-delivery formulations. Techniques for formulating a variety of other sustained- or controlled-delivery means, such as liposome carriers, bio-erodible microparticles or porous beads and depot injections, are also known to those skilled in the art. See, for example, International Patent Application No. PCT/US93/00829, which is incorporated by reference and describes controlled release of porous polymeric microparticles for delivery of pharmaceutical compositions. Sustained-release preparations may include semipermeable polymer matrices in the form of shaped articles, e.g., films, or microcapsules. Sustained release matrices may include polyesters, hydrogels, polylactides (as disclosed in U.S. Pat. No. 3,773,919 and European Patent Application Publication No. EP 058481, each of which is incorporated by reference), copolymers of L-glutamic acid and gamma ethyl-L-glutamate (Sidman et al., 1983, Biopolymers 2:547-556), poly (2-hydroxyethyl-methacrylate) (Langer et al., 1981, J. Biomed. Mater. Res. 15:167-277 and Langer, 1982, Chem. Tech. 12:98-105), ethylene vinyl acetate (Langer et al., 1981, supra) or poly-D(−)-3-hydroxybutyric acid (European Patent Application Publication No. EP 133,988). Sustained release compositions may also include liposomes that can be prepared by any of several methods known in the art. See, e.g., Eppstein et al., 1985, Proc. Natl. Acad. Sci. U.S.A. 82:3688-3692; European Patent Application Publication Nos. EP 036,676; EP 088,046 and EP 143,949, incorporated by reference.

[0407] Pharmaceutical compositions used for in vivo administration are typically provided as sterile preparations. Sterilization can be accomplished by filtration through sterile filtration membranes. When the composition is lyophilized, sterilization using this method may be conducted either prior to or following lyophilization and reconstitution. Compositions for parenteral administration can be stored in lyophilized form or in a solution. Parenteral compositions generally are placed into a container having a sterile access port, for example, an intravenous solution bag or vial having a stopper pierceable by a hypodermic injection needle.

[0408] Aspects of the invention includes self-buffering antibody construct of the invention formulations, which can be used as pharmaceutical compositions, as described in international patent application WO 06138181A2 (PCT/US2006/022599), which is incorporated by reference in its entirety herein.

[0409] As discussed above, certain embodiments provide antibody construct of the invention protein compositions, particularly pharmaceutical compositions of the invention, that comprise, in addition to the antibody construct of the invention, one or more excipients such as those illustratively described in this section and elsewhere herein. Excipients can be used in the invention in this regard for a wide variety of purposes, such as adjusting physical, chemical, or biological properties of formulations, such as adjustment of viscosity, and or processes of the invention to improve effectiveness and or to stabilize such formulations and processes against degradation and spoilage due to, for instance, stresses that occur during manufacturing, shipping, storage, pre-use preparation, administration, and thereafter.

[0410] A variety of expositions are available on protein stabilization and formulation materials and methods useful in this regard, such as Arakawa et al., “Solvent interactions in pharmaceutical formulations,” Pharm Res. 8(3): 285-91 (1991); Kendrick et al., “Physical stabilization of proteins in aqueous solution,” in: RATIONAL DESIGN OF STABLE PROTEIN FORMULATIONS: THEORY AND PRACTICE, Carpenter and Manning, eds. Pharmaceutical Biotechnology. 13: 61-84 (2002), and Randolph et al., “Surfactant-protein interactions,” Pharm Biotechnol. 13: 159-75 (2002), each of which is herein incorporated by reference in its entirety, particularly in parts pertinent to excipients and processes of the same for self-buffering protein formulations in accordance with the current invention, especially as to protein pharmaceutical products and processes for veterinary and/or human medical uses.

[0411] Salts may be used in accordance with certain embodiments of the invention to, for example, adjust the ionic strength and/or the isotonicity of a formulation and/or to improve the solubility and/or physical stability of a protein or other ingredient of a composition in accordance with the invention.

[0412] As is well known, ions can stabilize the native state of proteins by binding to charged residues on the protein's surface and by shielding charged and polar groups in the protein and reducing the strength of their electrostatic interactions, attractive, and repulsive interactions. Ions also can stabilize the denatured state of a protein by binding to, in particular, the denatured peptide linkages (—CONH) of the protein. Furthermore, ionic interaction with charged and polar groups in a protein also can reduce intermolecular electrostatic interactions and, thereby, prevent or reduce protein aggregation and insolubility.

[0413] Ionic species differ significantly in their effects on proteins. A number of categorical rankings of ions and their effects on proteins have been developed that can be used in formulating pharmaceutical compositions in accordance with the invention. One example is the Hofineister series, which ranks ionic and polar non-ionic solutes by their effect on the conformational stability of proteins in solution. Stabilizing solutes are referred to as “kosmotropic.” Destabilizing solutes are referred to as “chaotropic.” Kosmotropes commonly are used at high concentrations (e.g., >1 molar ammonium sulfate) to precipitate proteins from solution (“salting-out”). Chaotropes commonly are used to denture and/or to solubilize proteins (“salting-in”). The relative effectiveness of ions to “salt-in” and “salt-out” defines their position in the Hofineister series.

[0414] Free amino acids can be used in the antibody construct of the invention formulations in accordance with various embodiments of the invention as bulking agents, stabilizers, and antioxidants, as well as other standard uses. Lysine, proline, serine, and alanine can be used for stabilizing proteins in a formulation. Glycine is useful in lyophilization to ensure correct cake structure and properties. Arginine may be useful to inhibit protein aggregation, in both liquid and lyophilized formulations. Methionine is useful as an antioxidant.

[0415] Polyols include sugars, e.g., mannitol, sucrose, and sorbitol and polyhydric alcohols such as, for instance, glycerol and propylene glycol, and, for purposes of discussion herein, polyethylene glycol (PEG) and related substances. Polyols are kosmotropic. They are useful stabilizing agents in both liquid and lyophilized formulations to protect proteins from physical and chemical degradation processes. Polyols also are useful for adjusting the tonicity of formulations.

[0416] Among polyols useful in select embodiments of the invention is mannitol, commonly used to ensure structural stability of the cake in lyophilized formulations. It ensures structural stability to the cake. It is generally used with a lyoprotectant, e.g., sucrose. Sorbitol and sucrose are among preferred agents for adjusting tonicity and as stabilizers to protect against freeze-thaw stresses during transport or the preparation of bulks during the manufacturing process. Reducing sugars (which contain free aldehyde or ketone groups), such as glucose and lactose, can glycate surface lysine and arginine residues. Therefore, they generally are not among preferred polyols for use in accordance with the invention. In addition, sugars that form such reactive species, such as sucrose, which is hydrolyzed to fructose and glucose under acidic conditions, and consequently engenders glycation, also is not among preferred polyols of the invention in this regard. PEG is useful to stabilize proteins and as a cryoprotectant and can be used in the invention in this regard.

[0417] Embodiments of the antibody construct of the invention formulations further comprise surfactants. Protein molecules may be susceptible to adsorption on surfaces and to denaturation and consequent aggregation at air-liquid, solid-liquid, and liquid-liquid interfaces. These effects generally scale inversely with protein concentration. These deleterious interactions generally scale inversely with protein concentration and typically are exacerbated by physical agitation, such as that generated during the shipping and handling of a product.

[0418] Surfactants routinely are used to prevent, minimize, or reduce surface adsorption. Useful surfactants in the invention in this regard include polysorbate 20, polysorbate 80, other fatty acid esters of sorbitan polyethoxylates, and poloxamer 188.

[0419] Surfactants also are commonly used to control protein conformational stability. The use of surfactants in this regard is protein-specific since, any given surfactant typically will stabilize some proteins and destabilize others.

[0420] Polysorbates are susceptible to oxidative degradation and often, as supplied, contain sufficient quantities of peroxides to cause oxidation of protein residue side-chains, especially methionine. Consequently, polysorbates should be used carefully, and when used, should be employed at their lowest effective concentration. In this regard, polysorbates exemplify the general rule that excipients should be used in their lowest effective concentrations.

[0421] Embodiments of the antibody construct of the invention formulations further comprise one or more antioxidants. To some extent deleterious oxidation of proteins can be prevented in pharmaceutical formulations by maintaining proper levels of ambient oxygen and temperature and by avoiding exposure to light. Antioxidant excipients can be used as well to prevent oxidative degradation of proteins. Among useful antioxidants in this regard are reducing agents, oxygen/free-radical scavengers, and chelating agents. Antioxidants for use in therapeutic protein formulations in accordance with the invention preferably are water-soluble and maintain their activity throughout the shelf life of a product. EDTA is a preferred antioxidant in accordance with the invention in this regard.

[0422] Antioxidants can damage proteins. For instance, reducing agents, such as glutathione in particular, can disrupt intramolecular disulfide linkages. Thus, antioxidants for use in the invention are selected to, among other things, eliminate or sufficiently reduce the possibility of themselves damaging proteins in the formulation.

[0423] Formulations in accordance with the invention may include metal ions that are protein co-factors and that are necessary to form protein coordination complexes, such as zinc necessary to form certain insulin suspensions. Metal ions also can inhibit some processes that degrade proteins. However, metal ions also catalyze physical and chemical processes that degrade proteins.

[0424] Magnesium ions (10-120 mM) can be used to inhibit isomerization of aspartic acid to isoaspartic acid. Ca+2 ions (up to 100 mM) can increase the stability of human deoxyribonuclease. Mg+2, Mn+2, and Zn+2, however, can destabilize rhDNase. Similarly, Ca+2 and Sr+2 can stabilize Factor VIII, it can be destabilized by Mg+2, Mn+2 and Zn+2, Cu+2 and Fe+2, and its aggregation can be increased by Al+3 ions.

[0425] Embodiments of the antibody construct of the invention formulations further comprise one or more preservatives. Preservatives are necessary when developing multi-dose parenteral formulations that involve more than one extraction from the same container. Their primary function is to inhibit microbial growth and ensure product sterility throughout the shelf-life or term of use of the drug product. Commonly used preservatives include benzyl alcohol, phenol and m-cresol. Although preservatives have a long history of use with small-molecule parenterals, the development of protein formulations that includes preservatives can be challenging. Preservatives almost always have a destabilizing effect (aggregation) on proteins, and this has become a major factor in limiting their use in multi-dose protein formulations. To date, most protein drugs have been formulated for single-use only. However, when multi-dose formulations are possible, they have the added advantage of enabling patient convenience, and increased marketability. A good example is that of human growth hormone (hGH) where the development of preserved formulations has led to commercialization of more convenient, multi-use injection pen presentations. At least four such pen devices containing preserved formulations of hGH are currently available on the market. Norditropin (liquid, Novo Nordisk), Nutropin AQ (liquid, Genentech) & Genotropin (lyophilized—dual chamber cartridge, Pharmacia & Upjohn) contain phenol while Somatrope (Eli Lilly) is formulated with m-cresol. Several aspects need to be considered during the formulation and development of preserved dosage forms. The effective preservative concentration in the drug product must be optimized. This requires testing a given preservative in the dosage form with concentration ranges that confer anti-microbial effectiveness without compromising protein stability.

[0426] As might be expected, development of liquid formulations containing preservatives are more challenging than lyophilized formulations. Freeze-dried products can be lyophilized without the preservative and reconstituted with a preservative containing diluent at the time of use. This shortens the time for which a preservative is in contact with the protein, significantly minimizing the associated stability risks. With liquid formulations, preservative effectiveness and stability should be maintained over the entire product shelf-life (about 18 to 24 months). An important point to note is that preservative effectiveness should be demonstrated in the final formulation containing the active drug and all excipient components.

[0427] The antibody construct of the invention generally will be designed for specific routes and methods of administration, for specific administration dosages and frequencies of administration, for specific treatments of specific diseases, with ranges of bio-availability and persistence, among other things. Formulations thus may be designed in accordance with the invention for delivery by any suitable route, including but not limited to orally, aurally, opthalmically, rectally, and vaginally, and by parenteral routes, including intravenous and intraarterial injection, intramuscular injection, and subcutaneous injection.

[0428] Once the pharmaceutical composition has been formulated, it may be stored in sterile vials as a solution, suspension, gel, emulsion, solid, crystal, or as a dehydrated or lyophilized powder. Such formulations may be stored either in a ready-to-use form or in a form (e.g., lyophilized) that is reconstituted prior to administration. The invention also provides kits for producing a single-dose administration unit. The kits of the invention may each contain both a first container having a dried protein and a second container having an aqueous formulation. In certain embodiments of this invention, kits containing single and multi-chambered pre-filled syringes (e.g., liquid syringes and lyosyringes) are provided. The therapeutically effective amount of an antibody construct of the invention protein-containing pharmaceutical composition to be employed will depend, for example, upon the therapeutic context and objectives. One skilled in the art will appreciate that the appropriate dosage levels for treatment will vary depending, in part, upon the molecule delivered, the indication for which the antibody construct of the invention is being used, the route of administration, and the size (body weight, body surface or organ size) and/or condition (the age and general health) of the patient. In certain embodiments, the clinician may titer the dosage and modify the route of administration to obtain the optimal therapeutic effect. A typical dosage may range from about 0.1 μg/kg to up to about 30 mg/kg or more, depending on the factors mentioned above. In specific embodiments, the dosage may range from 1.0 μg/kg up to about 20 mg/kg, optionally from 10 μg/kg up to about 10 mg/kg or from 100 μg/kg up to about 5 mg/kg.

[0429] A therapeutic effective amount of an antibody construct of the invention preferably results in a decrease in severity of disease symptoms, in increase in frequency or duration of disease symptom-free periods or a prevention of impairment or disability due to the disease affliction. For treating CDH19-expressing tumors, a therapeutically effective amount of the antibody construct of the invention, e.g. an anti-CDH19/CD3 antibody construct, preferably inhibits cell growth or tumor growth by at least about 20%, at least about 40%, at least about 50%, at least about 60%, at least about 70%, at least about 80%, or at least about 90% relative to untreated patients. The ability of a compound to inhibit tumor growth may be evaluated in an animal model predictive of efficacy in human tumors.

[0430] Pharmaceutical compositions may be administered using a medical device. Examples of medical devices for administering pharmaceutical compositions are described in U.S. Pat. Nos. 4,475,196; 4,439,196; 4,447,224; 4,447,233; 4,486,194; 4,487,603; 4,596,556; 4,790,824; 4,941,880; 5,064,413; 5,312,335; 5,312,335; 5,383,851; and 5,399,163, all incorporated by reference herein.

[0431] In one embodiment the invention provides the antibody construct of the invention or produced according to the process of the invention for use in the prevention, treatment or amelioration of a melanoma disease or metastatic melanoma disease.

[0432] The invention also provides a method for the treatment or amelioration of a melanoma disease or metastatic melanoma disease, comprising the step of administering to a subject in need thereof the antibody construct of the invention or produced according to the process of the invention.

[0433] In a preferred embodiment method of use of the invention the melanoma disease or metastatic melanoma disease is selected from the group consisting of superficial spreading melanoma, lentigo maligna, lentigo maligna melanoma, acral lentiginous melanoma and nodular melanoma.

[0434] In a further embodiment, the invention provides a kit comprising an antibody construct of the invention, or produced according to the process of the invention, a vector of the invention, and/or a host cell of the invention.

[0435] It should be understood that the inventions herein are not limited to particular methodology, protocols, or reagents, as such can vary. The discussion and examples provided herein are presented for the purpose of describing particular embodiments only and are not intended to limit the scope of the present invention, which is defined solely by the claims.

[0436] All publications and patents cited throughout the text of this specification (including all patents, patent applications, scientific publications, manufacturer's specifications, instructions, etc.), whether supra or infra, are hereby incorporated by reference in their entirety. Nothing herein is to be construed as an admission that the invention is not entitled to antedate such disclosure by virtue of prior invention. To the extent the material incorporated by reference contradicts or is inconsistent with this specification, the specification will supersede any such material.

### EXAMPLES

[0437] The following examples are provided for the purpose of illustrating specific embodiments or features of the present invention. These examples should not be construed as to limit the scope of this invention. The examples are included for purposes of illustration, and the present invention is limited only by the claims.

### Example 1

### Fully Human Monoclonal Antibodies Against CDH19

### 1.1 Immunization:

[0438] Fully human antibodies to Cadherin-19 (CDH19) were generated using XENOMOUSE® technology, transgenic mice engineered to express diverse repertoires of fully human IgGκ and IgGλ antibodies of the corresponding isotype. (U.S. Pat. Nos. 6,114,598; 6,162,963; 6,833,268; 7,049,426; 7,064,244, which are incorporated herein by reference in their entirety; Green et al., 1994, Nature Genetics 7:13-21; Mendez et al., 1997, Nature Genetics 15:146-156; Green and Jakobovitis, 1998, J. Ex. Med. 188:483-495; Kellermann and Green, Current Opinion in Biotechnology 13, 593-597, 2002).

[0439] Mice were immunized with multiple forms of Cadherin-19 immunogen, including: (1) full length human and cynomologous (“cyno”) monkey cadherin-19, (2) secreted Cadherin-19 ecto-domain (amino acids 1-596), and (3) a truncated membrane bound form of human cadherin-19 (amino acids 1-624). Mice were immunized over a period of 8 to 10 weeks with a range of 16-18 boosts.

[0440] Sera were collected at approximately 5 and 9 weeks after the first injection and specific titers were determined by FACs staining of recombinant Cadherin-19 receptor transiently expressed on CHO—S cells. A total of 37 animals were identified with specific immune responses, these animals were pooled into 3 groups and advanced to antibody generation.

### 1.2 Preparation of Monoclonal Antibodies

[0441] Animals exhibiting suitable titers were identified, and lymphocytes were obtained from draining lymph nodes and, if necessary, pooled for each cohort. Lymphocytes were dissociated from lymphoid tissue by grinding in a suitable medium (for example, Dulbecco's Modified Eagle Medium (DMEM); obtainable from Invitrogen, Carlsbad, Calif.) to release the cells from the tissues, and suspended in DMEM. B cells were selected and/or expanded using standard methods, and fused with suitable fusion partner using techniques that were known in the art.

[0442] After several days of culture, the hybridoma supernatants were collected and subjected to screening assays as detailed in the examples below, including confirmation of binding to human and cynomologous monkey as well as the ability to kill cell lines in secondary antibody-drug conjugate Bioassays. Hybridoma lines that were identified to have the binding and functional properties of interest were then further selected and subjected to standard cloning and subcloning techniques. Clonal lines were expanded in vitro, and the secreted human antibodies obtained for analysis and V gene sequencing was performed.

### 1.3 Selection of Cadherin-19 Receptor Specific Binding Antibodies by FMAT

[0443] After 14 days of culture, hybridoma supernatants were screened for CDH19-specific monoclonal antibodies by Fluorometric Microvolume Assay Technology (FMAT) (Applied Biosystems, Foster City, Calif.). The supernatants were screened against adherent CHO cells transiently transfected with human Cadherin-19 and counter screened against CHO cells transiently transfected with the same expression plasmid that did not contain the Cadherin-19 gene.

[0444] After multiple screening campaigns, a panel of 1570 anti-Cadherin-19 binding hybridoma lines were identified and advanced to further characterization assays.

### Example 2

### Assessment of Fully Human Monoclonal Antibodies Against CDH19

### 2.1 Additional Binding Characterization by Flow Cytometry (FACs)

[0445] FACS binding assays were performed to evaluate the binding of the anti-Cadherin-19 receptor specific antibodies to endogenous Cadherin-19 receptor expressed on the CHL-1 tumor cell lines. In addition, cross-reactive binding to murine and cynomologous monkey Cadherin-19 orthologues was also evaluated by FACs using recombinant forms of the various receptors transiently expressed on 293T cells.

[0446] FACs assays were performed by incubating hybridoma supernatants with 10,000 to 25,000 cells in PBS/2% Fetal bovine serum/2 mM Calcium Chloride at 4° C. for one hour followed by two washes with PBS/2% Fetal bovine serum/2 mM Calcium Chloride. Cells were then treated with florochrome-labeled secondary antibodies at 4° C. followed by one wash. The cells were resuspended in 50 μl of PBS/2% FBS and antibody binding was analyzed using a FACSCalibur™ instrument.

2.2 Antibody Drug Conjugate Screening of Fully Human Antibodies Derived from XenoMouse® Hybridomas

[0447] Cell killing through antibody drug conjugates requires the delivery of the conjugate into a cell through internalization and the catabolism of the drug-conjugate into a form that it is toxic to the cell. To identify antibodies with these properties, CDH19-positive cell lines (Colo-699 or CHL-1) were seeded at low cell densities and allowed to adhere overnight in a 384 well plate. XENOMOUSE® hybridoma samples containing fully human anti-CDH19 antibodies were then added to these cells in the presence of a high concentration of a goat anti-human Fc monovalent Fab conjugated with DM1 (DM1-Fab) at a relatively low drug-antibody ratio (DAR) (˜1.3). The cells were incubated for 96 hours at 37° C. and 5% CO₂ in the presence of the antibody samples and the DM1-Fab. At the end of this time, the cell viability was assessed using the CellTiter-Glo® Luminescent Cell Viability reagent (Promega) according to manufacturer's recommendations.

[0448] An example of the cell viability data with the Colo-699 cells is shown in FIG. 1 and FIG. 2. The antibodies capable of delivering the DM1-Fab to the cells and inhibiting the cell growth read out with a lower luminescent signal (RLU). The top antibodies of interest from this screen are observed in the lower left corner of FIG. 1 and are denoted as open circles. These antibodies were taken forward into a cell viability assay on CHL-1 cells. The average cell viability data from the CHL-1 assay is plotted against the average cell viability data from the Colo-699 assay (FIG. 2). The antibodies that had activity on both the Colo-699 and the CHL-1 cells are denoted as open circles on the left-hand side of the FIG. 2.

[0449] This assay was run concurrently with the FACs antibody binding assay above (2.2), and the results from these two studies were used to select the antibodies for further characterization. In total, 1570 antibodies were run through these cell based viability assays and approximately 44 antibodies were selected on the bases of in vitro cell killing and/or antibody binding for sub-cloning, V gene sequencing and expressed in recombinant form for further characterization assays as described below.

[0450] These 44 antibodies were again assayed as in Example 2 and 19 antibodies were selected that contained unique sequences. Of these 19 antibodies, 18 antibodies were analyzed and their properties characterized in Table 2 below. The data in this table was generated using FACs binding on recombinant human and cynomologous CDH-19, +/−Calcium (Ca⁺²⁾ binding data on 293/CDH-19 transfectants, binding to endogenous CDH-19 on CHL-1 and Colo699 tumor cells and competition with the antibody designated as 4A9 in the table. These experiments provided the further characterizations for the grouping of these antibodies into 5 groups or bins.

TABLE 2
Binning of Lead panel using Antibody Binding Information

| | LMR | | |
|---|---|---|---|
| Bin | Sequence/ | Clone | |
| ID | Ab ID | ID | Bin Characteristics |
| 1 | 13589 | 4A9 | High Endogenous binding, Calcium |
| | 13591 | 4F7 | insensitive, sequence clustered, moderate |
| | | | cyno complete 4A9 competitor |
| 2 | 13885 | 19B5 | High Endogenous binding, Calcium |
| | 13880 | 25F8 | insensitive, sequence clustered, Good cyno, |
| | 13882 | 26D1 | partial 4A9 competitor |
| | 13881 | 26F12 = 27B3 | |
| | 13878 | 16H2 = 20D3 = 23E7 | |
| | 13879 | 22D1 | |
| 3 | 13877 | 22G10 | High Endogenous binding, moderate 293 |
| | 13874 | 17H8 = 23B6 = 28D10 | binding, Calcium insensitive, 2 sequence |
| | 13883 | 25G10 | clusters, moderate cyno, partial |
| | 13875 | 16C1 | 4A9 competitor, 22G10 best binder in bin. |
| 4 | 13590 | 4B10 | Low Endogenous and recombinant binding, |
| | 13586 | 4F3 | Calcium sensitive, sequence diverse group, |
| | 13592 | 4A2 | comparable cyno, No 4A9 competition |
| | 13884 | 23A10 | |
| | 13588 | 2G6 | |
| 5 | 13876 | 16A4 | Best endogenous binder, moderate |
| | | | recombinant binder, calcium insensitive, very |
| | | | weak cyno, No 4A9 competition. |

[0451] Of these 18 antibodies. 8 antibodies were selected for further analysis of their epitope binding as described below. At least one representative antibody from each bin was selected for further analysis.

### Example 3

### Epitope Prediction

### Epitope Prediction by 4A9 Antibody Competition and by Human/Mouse Cadherin-19 Chimeras

[0452] A 4A9 binding competition method was developed to identify antibodies that compete with 4A9 binding. In 96-well V-bottom plates (Sarstedt #82.1583.001), 50,000 transiently transfected 293T cells were incubated with 5 ug/ml of purified anti-CDH19 antibodies for 1 hr at 4° C. followed by one wash with PBS/2% FBS. 25 μl of 5 μg/ml Alexa647-labelled 4A9 was then added to each well and the plates incubated for 1 hour at 4° C. Cells were then washed two times and the amount of cell associated Alexa647-labelled 4A9 was quantitated by flow cytometry.

[0453] The experiments included negative controls consisting of PBS/2% FBS only. The average signal observed in these negative control experiments was adopted as the maximum possible signal for the assay. Antibodies were compared to this maximum signal and a percent inhibition was calculated for each well (% Inhibition=(1−(FL4 Geomean with the anti-CDH19 antibodies/Maximum FL4 Geomean signal)).

[0454] Domain binding was determined by flow cytometry as above on 293T cells transiently transfected with plasmids consisting of single or dual human CDH19 cadherin repeat domain replacements into the mouse Cadherin19 backbone cloned into the pTT5 expression vector immediately preceded by native human or murine CDH19 leader sequences and a Flag tag (SEQ ID NO: 968). The experiment included assaying the anti-CDH19 antibodies against mouse Cadherin19 to determine suitability for binning on these human/mouse chimeras.

[0455] The data from these experiments are presented in the Table below entitled as follows:

TABLE 3
Calcium Sensitive Binding and Epitope Prediction Summary

| | | | Ca2+ | Competes | Hu | Hu | Hu | Hu | Hu | Hu | Hu | Hu | Mu | Predicted |
|---|---|---|---|---|---|---|---|---|---|---|---|---|---|---|
| Clone | | | Sensitive | with 4A9 | EC1-5 | EC1 | EC1-2 | EC2 | EC2-3 | EC3 | EC4-5 | EC5 | EC1-5 | Epitope |
| ID | Ab ID | Bin | Binding | (13589) | A | B | C | D | E | F | G | H | I | Region |
| 4A9 | 13589 | 1 | No | Yes | + | + | + | − | − | − | − | − | − | 44-141 |
| | 14056 | 1 | No | Yes | + | + | + | − | − | − | − | − | − | |
| | 14057 | 1 | No | Yes | + | + | + | − | − | − | − | − | − | |
| 25F8 | 13880 | 2 | No | Yes | + | + | + | − | − | − | − | − | − | |
| | 14094 | 2 | No | Yes | + | + | + | − | − | − | − | − | − | |
| | 14096 | 2 | No | Yes | + | + | + | − | − | − | − | − | − | |
| 26D1 | 13882 | 2 | No | Yes | + | + | + | − | − | − | − | − | − | |
| | 14088 | 2 | No | Yes | + | + | + | − | − | − | − | − | − | |
| 17H8 | 13874 | 3 | No | Yes | + | + | + | − | − | − | − | − | − | |
| | 14045 | 3 | No | Yes | + | + | + | − | − | − | − | − | − | |
| | 14048 | 3 | No | Yes | + | + | + | − | − | − | − | − | − | |
| 4A2 | 13592 | 4 | Yes | No | + | − | − | − | + | + | − | − | − | 250-364 |
| | 14026 | 4 | Yes | No | + | − | − | − | + | + | − | − | − | |
| 4B10 | 13590 | 4 | Yes | No | + | − | − | − | + | + | − | − | − | |
| | 14055 | 4 | Yes | No | + | − | − | − | + | + | − | − | − | |
| | 14054 | 4 | Yes | No | + | − | − | − | + | + | − | − | − | |
| 2G6 | 13588 | 4 | Yes | No | + | + | + | + | + | + | + | + | + | un- |
| | 14304 | 4 | Yes | No | + | + | + | + | + | + | + | + | + | assignable |
| | 14039 | 4 | Yes | No | + | + | + | + | + | + | + | + | + | |
| 16A4 | 13876 | 5 | No | No | + | + | + | − | − | − | − | − | − | Unassigned |
| | 14071 | 5 | No | No | + | + | + | − | − | − | − | − | − | complex |

| | | | | | | | | | | |
|---|---|---|---|---|---|---|---|---|---|---|
| Rat anti-FLAG | + | + | + | + | + | + | + | + | + | epitope |

Legend Table 3
Human and/or murine chimera constructs
A = huCDH19(44-772) (see SEQ ID NO: 944)
B = huCDH19(44-141)::muCDH19(140-770) (see SEQ ID NO: 952)
C = huCDH19(44-249)::muCDH19(248-770) (see SEQ ID NO: 954)
D = muCDH19(44-139)::huCDH19(142-249)::muCDH19(248-770) (see SEQ ID NO: 956)
E = muCDH19(44-139)::huCDH19(142-364)::muCDH19(363-770) (see SEQ ID NO: 958)
F = muCDH19(44-247)::huCDH19(250-364)::muCDH19(363-770) (see SEQ ID NO: 960)
G = muCDH19(44-362)::huCDH19(365-772) (see SEQ ID NO: 962)
H = muCDH19(44-461)::huCDH19(464-772) (see SEQ ID NO: 964)
I = muCDH19(44-770) (see SEQ ID NO: 966)

### Epitope Prediction by Human/Chicken Cadherin-19 Chimeras

[0456] Domain binding was determined by flow cytometry on 293T cells transiently transfected with plasmids consisting of single human CDH19 cadherin repeat domain replacements into the chicken Cadherin19 backbone cloned into the pTT5 expression vector immediately preceded by native human or chicken CDH19 leader sequences and a Flag tag. The experiment included assaying a subset of anti-CDH19 antibodies against chicken Cadherin19 to determine suitability for binning on these human/chicken chimeras.

[0457] The following binding assay was completed in presence of 2 mM CaCl2. In 96-well V-bottom plates (Costar 3897), 50,000 transiently transfected 293T cells were incubated with 5 ug/ml of purified anti-CDH19 antibodies for 1 hr at 4° C. followed by two washes with PBS/2% FBS. 50 μl of 5 μg/ml Alexa647-labelled anti-human IgG secondary antibody (Jackson Immuno 109-605-098) and 2 ug/ml 7AAD (Sigma A9400) was then added to each well and the plates incubated for 15 minutes at 4° C. Cells were then washed one time and the amount of cell associated Alexa647-labelled Ab was quantitated by flow cytometry. The experiments included mock transfected controls. The data from these experiments are presented in the Table below, n.d.=not determined.

TABLE 4
Antibody Bin C Epitope Prediction Summary

| | | | Hu | Ck | Hu | Hu | Hu | Hu | Predicted |
|---|---|---|---|---|---|---|---|---|---|
| Clone | | | EC1-5 | EC1-5 | EC1 | EC2 | EC3 | EC5 | Epitope |
| ID | Ab. ID | Bin | A | J | K | L | M | O | Region |
| 4A9 | 13589 | 1 | + | − | + | − | − | − | 44-141 |
| 26F12 | 13881 | 2 | + | − | + | − | − | − | Bin A |
| 25F8 | 14096 | 2 | + | − | + | − | − | − | |
| 26D1 | 13882 | 2 | + | − | + | − | − | − | |
| 17H8 | 13874 | 3 | + | − | + | − | − | − | |
| 16A4 | 14071 | 5 | + | − | + | − | − | − | |
| 4A2 | 13592 | 4 | + | − | − | − | + | − | 250-364 |
| 4B10 | 13590 | 4 | + | − | − | − | + | − | Bin B |
| 2G6 | 13588 | 4 | + | − | − | − | + | − | |
| 23A10 | 14077 | 4 | + | − | − | − | + | − | |

| | | | | | | | |
|---|---|---|---|---|---|---|---|
| Rat anti-FLAG | + | + | + | + | + | + | control |

Positive Binding (+)
Negative Binding (−)
Legend Table 4
Human and/or chicken chimera constructs
A = huCDH19(44-772) (see SEQ ID NO: 944)
J = ckCDH19(44-776) (see SEQ ID NO: 1451)
K = huCDH19(44-141)::ckCDH19(142-776) (see SEQ ID NO: 1452)
L = ckCDH19(44-141)::huCDH19(142-249)::ckCDH19(250-776) (see SEQ ID NO: 1453)
M = ckCDH19(44-249)::huCDH19(250-364)::ckCDH19(365-776) (see SEQ ID NO: 1454)
N = ckCDH19(44-364)::huCDH19(365-463)::ckCDH19(469-776) (see SEQ ID NO: 1455)
O = ckCDH19(44-468)::huCDH19(464-772) (see SEQ ID NO: 1456)

### Epitope Prediction by Macaque/Dog or Rat/Macaque Cadherin-19 Chimeras

[0458] Domain binding was determined by flow cytometry on 293T cells transiently transfected with plasmids consisting of rhesus macaque CDH19 cadherin repeat domain 1 or segments domain 1 (designated EC1a, EC1b, EC1c) replacements into the dog Cadherin19 backbone, or rat CDH19 cadherin repeat domain 2 replacement into the rhesus Cadherin19 backbone cloned into the pTT5 expression vector immediately preceded by native rhesus or canine CDH19 leader sequences and a Flag tag. The experiment included assaying a subset of anti-CDH19 antibodies against dog, rat and macaque Cadherin19 to determine suitability for binning on these macaque/dog and rat/rhesus chimeras.

[0459] The following binding assay was completed in presence of 2 mM CaCl2. In 96-well V-bottom plates (Costar 3897), 50,000 transiently transfected 293T cells were incubated with 5 ug/ml of purified anti-CDH19 antibodies for 1 hr at 4° C. followed by two washes with PBS/2% FBS. 50 μl of 5 μg/ml Alexa647-labelled anti-human IgG secondary antibody (Jackson Immuno 109-605-098) and 2 ug/ml 7AAD (Sigma A9400) was then added to each well and the plates incubated for 15 minutes at 4° C. Cells were then washed one time and the amount of cell associated Alexa647-labelled Ab was quantitated by flow cytometry. The experiments included mock transfected controls. The data from these experiments are presented in the Table below, n.d.=not determined.

TABLE 5
Antibody BinA Epitope prediction Summary

| | | | Rh | Ca | rh | rh | rh | ra | Ra | Predicted |
|---|---|---|---|---|---|---|---|---|---|---|
| Clone | | | EC1-5 | EC1-5 | EC1 | EC1a | EC1b | EC2 | EC1-5 | Epitope |
| ID | Ab. ID | Bin | P | Q | R | S | T | V | W | Region |
| 4A9 | 13589 | 1 | + | − | + | − | − | − | − | 44-141 |
| | | | | | | | | | | Bin A.1 |
| 26F12 | 13881 | 2 | + | − | + | + | + | − | − | 44-141 |
| 25F8 | 14096 | 2 | + | − | + | + | + | − | − | Bin A.2 |
| 26D1 | 13882 | 2 | + | − | + | + | + | − | − | (44-114) |
| 17H8 | 13874 | 3 | + | − | + | + | − | − | − | 44-141 |
| 16A4 | 14071 | 5 | + | − | + | + | − | n.d. | + | Bin A.3 |
| | | | | | | | | | | (44-65) |
| 4A2 | 13592 | 4 | + | − | n.d. | n.d. | n.d. | n.d. | + | 250-364 |
| 4B10 | 13590 | 4 | + | + | n.d. | n.d. | n.d. | n.d. | + | Bin B |
| 2G6 | 13588 | 4 | + | + | n.d. | n.d. | n.d. | n.d. | + | |
| 23A10 | 14077 | 4 | + | + | n.d. | n.d. | n.d. | n.d. | + | |

| | | | | | | | |
|---|---|---|---|---|---|---|---|
| Rat anti-FLAG | + | + | + | + | + | + | + |

Positive Binding (+)
Negative Binding (−)
Not Determined (n.d.)
Legend Table 5
Rhesus macaque, dog, and/or rat chimera constructs
P = rhCDH19(44-772) (see SEQ ID NO: 1457)
Q = caCDH19(44-770) (see SEQ ID NO: 1458)
R = rhCDH19(44-141)::caCDH19(141-770) (see SEQ ID NO: 1459)
S = rhCDH19(44-65)::caCDH19(65-770) (see SEQ ID NO: 1460)
T = caCDH19(44-87)::rhCDH19(89-114)::caCDH19(115-770) (see SEQ ID NO: 1461)
U = caCDH19(44-120)::rhCDH19(122-137)::caCDH19(137-770) (see SEQ ID NO: 1462)
V = rhCDH19(44-141)::raCDH19(140-247)::rhCDH19(250-772) (see SEQ ID NO: 1463)
W = raCDH19(44-770) (see SEQ ID NO: 1464)

[0460] The data summarized in table 5 allowed for segregating the binder of Bin A 44-141 into the following subgroups:

### Bin A.1 44-141

### Bin A.2 44-141 (44-114)

### Bin A.3 44-141 (44-65)

### Epitope Prediction by Rat/Mouse or Human/Mouse Cadherin-19 Chimeras

[0461] Domain binding was determined by flow cytometry on 293T cells transiently transfected with plasmids consisting of rat CDH19 cadherin repeat domain 3 substitutions (designated EC3a, EC3b) or human CDH19 cadherin repeat domain 3 substitution (designated EC3c) into the mouse Cadherin19 backbone cloned into the pTT5 expression vector immediately preceded by native mouse CDH19 leader sequence and a Flag tag. The experiment included assaying a subset of anti-CDH19 antibodies against human, rat and mouse Cadherin19 to determine suitability for binning on these rat/mouse and human/mouse chimeras.

[0462] The following binding assay was completed in presence of 2 mM CaCl2. In 96-well V-bottom plates (Costar 3897), 50,000 transiently transfected 293T cells were incubated with 5 ug/ml of purified anti-CDH19 antibodies for 1 hr at 4° C. followed by two washes with PBS/2% FBS. 50 μl of 5 μg/ml Alexa647-labelled anti-human IgG secondary antibody (Jackson Immuno 109-605-098) and 2 ug/ml 7AAD (Sigma A9400) was then added to each well and the plates incubated for 15 minutes at 4° C. Cells were then washed one time and the amount of cell associated Alexa647-labelled Ab was quantitated by flow cytometry. The experiments included mock transfected controls. The data from these experiments are presented in the Table below, n.d.=not determined.

TABLE 6
Antibody Bin B Epitope Prediction Summary

| | | | Hu | Mo | Ra | Ra | Ra | Hu | Predicted |
|---|---|---|---|---|---|---|---|---|---|
| Clone | | | EC1-5 | EC1-5 | EC1-5 | EC3c | EC3b | EC3a | Epitope |
| ID | Ab. ID | Bin | A | I | W | X | Y | Z | Region |
| 4A9 | 13589 | 1 | + | − | − | n.d. | n.d. | n.d. | 44-141 |
| 26F12 | 13881 | 2 | + | − | − | n.d. | n.d. | n.d. | Bin A |
| 25F8 | 14096 | 2 | + | − | − | n.d. | n.d. | n.d. | |
| 26D1 | 13882 | 2 | + | − | − | n.d. | n.d. | n.d. | |
| 17H8 | 13874 | 3 | + | − | − | n.d. | n.d. | n.d. | |
| 16A4 | 14071 | 5 | + | − | + | n.d. | n.d. | n.d. | |
| 4A2 | 13592 | 4 | + | − | + | + | − | − | 250-364 |
| 4B10 | 13590 | 4 | + | − | + | + | − | − | (324-327) |
| | | | | | | | | | Bin B.2 |
| 2G6 | 13588 | 4 | + | + | + | + | + | + | 250-364 |
| 23A10 | 14077 | 4 | + | + | + | n.d. | n.d. | n.d. | Bin B.1 |

| | | | | | | | |
|---|---|---|---|---|---|---|---|
| Rat anti-FLAG | + | + | + | + | + | + | control |

Positive Binding (+)
Negative Binding (−)
Not Determined (n.d.)
Legend Table 6
Rat/mouse or human/mouse chimera constructs
A = huCDH19(44-772) (see SEQ ID NO: 944)
I = muCDH19(44-770) (see SEQ ID NO: 966)
W = raCDH19(44-770) (see SEQ ID NO: 1464)
X = muCDH19(44-323)::raCDH19(324-327)::muCDH19(328-770) (see SEQ ID NO: 1465)
Y = muCDH19(44-770)::raCDH19(290, 299, 308) (see SEQ ID NO: 1466)
Z = muCDH19(44-770)::huCDH19(271) (see SEQ ID NO: 1467)

[0463] The data summarized in table 6 allowed for segregating the binder of Bin B 250-364 into the following subgroups:

### Bin B.1 250-364

[0464] Bin B.2 250-364 (324-327) by rodent numeration as referenced in table 6, corresponding to residues (326-329) within human and macaque CDH19

### Example 4

### Hotspot/Covariant Mutants

[0465] A total of 18 antibodies were analyzed for potential hotspots and covariance violations. The designed variants (shown below) outline amino acid substitutions capable of reducing and/or avoiding isomerization, deamidation, oxidation, covariance violations, and the like. The 80 engineered variants together with the 15 parental antibodies, thus totaling 95 sequences, were taken forward to the cloning, expression, and purification processes. Site-directed mutagenesis was performed on the engineered variants in a 96-well format. The parental antibodies and engineered variants were expressed by high throughput transient transfection in HEK 293-6E cells, purified using a modified AKTA auto-sampler and assayed for activity and biophysical characteristics. The 3 parental antibodies that had either free (unpaired) Cys or N-glycosylation site were not taken forward in this process. Those were replaced with the engineered version of the parental antibodies. The designed variants outline amino acid substitutions capable of reducing and/or avoiding isomerization, deamidation, oxidation, covariance violations, immunogenicity and the like. It will be appreciated that these variant sequences are examples of engineered antibodies within the meaning of the present application but single point and/or multiple point mutations can be combined in any combinatorial manner in order to arrive at a final desired antigen binding molecule or antibody.

### Example 5

### CDH19 mRNA Expression Pattern

[0466] RNA was extracted from individual patient tissues representing tumor (>70% tumor content by cell count) or normal (0% tumor content by cell count). Individual tissues were homogenized using TisssueLyzer (Qiagen, Valencia, Calif.) and total RNA extracted and purified by the mirVana total RNA extraction kit (Life Technologies, Foster City, Calif.). RNA quality and quantity checked by NanoDrop (NanoDrop, Wilmington, Del.) spectrophotometer readings and Bioanalyzer RNA profiling (Agilient Technologies, Santa Clara, Calif.). RNA was DNAse treated with DNA-free kit (Life Technologies, Foster City, Calif.) and reverse transcribed according to manufacturer's specifications using random hexamers in the High Capacity cDNA Reverse Transcription Kit (Life Technologies, Foster City, Calif.). Quantitative Real Time Polymerase Chain Reaction (qRT-PCR) was performed on cDNA using primers to CDH19, probeset Hs00253534_ml, (Life Technologies, Foster City, Calif.) or the housekeeping gene human ACTB (primers CCT GGC ACC CAG CAC AA; GCC GAT CCA CAC GGA GTA CT; probe ATC AAG ATC ATT GCT CCT CCT GAG CG). 10 μL qRT-PCR reaction components; 1.0 ng/μL cDNA, 2× Universal PCR Master Mix (Life Technologies, Foster City, Calif.), gene expression assay (ACTB; 75 nM primers, 150 nM probe. EPOR; 300 nM primers, 250 nM probe) Following the qRT-PCR amplification program: (1) activation at 50° C. for 2 min; (2) denaturation at 95° C. for 10 min; (3) amplification 40 cycles at 95° C. for 15 and 60° C. for 1 min with fluorescence capture at each step (ABI PRISM 7900HT Sequence Detection Systems, Applied Biosystems). Threshold cycle values (C_{T}) were determined, using Sequence Detector software version 2.3 (Applied Biosystems) and transformed to 2^{-ΔCT} for relative expression of CDH19 specific transcript to ACTB. The results are shown in FIG. 3. Of 54 unique metastatic and primary melanoma samples, the majority can be seen to overexpress CDH19 mRNA relative to the expression in samples from normal tissue.

### Example 6

### CDH19 Protein Expression

[0467] Expression of CDH19 protein was analyzed in human tumor samples by IHC and the results are shown in FIG. 4. Samples were fixed in 10% neutral buffered formalin for 24 hours, dehydrated and paraffin embedded. 4 μm sections were cut. Sections were deparaffinized first and then heated in DIVA Decloaker solution (Biocare) for 40 minutes for antigen retrieval. Remaining IHC steps were performed at room temperature in a DAKO Autostainer. Sections were incubated for 10 minutes with Peroxidazed 1 (Biocare) to block endogenous peroxidase, followed by incubation for 10 minutes with background sniper (Biocare) to reduce nonspecific background. Section were incubated for 60 minutes with CDH19 antibody (Novo Biologicals, Catalog #H00028513-B01P) at 5 μg/ml, then incubated for 30 minutes with Envision+HRP anti-mouse polymer (DAKO), followed by DAB+ (DAKO) for 5 minutes. Sections were counterstained with hematoxylin (DAKO) approximately for 1 minute. CDH19 expression could be detected in 62% of tumors examined (staining intensity 1+ in 101 of 162 samples). 51% of the tumor samples demonstrated medium to high expression (staining intensity of 2+ to 3+ in 83 of 162 samples). CDH19 showed dense and distinct membrane staining in many samples, although in some tumors heterogeneity was noted.

### Example 7

### Selection of Model Cell Lines

[0468] Tumor cell lines were analyzed by flow cytometry and IHC to identify model systems with CDH19 expression similar to human tumors. Human anti-huCDH19 IgG4 antibody 4A2 was purified directly from hybridoma conditioned media. For flow cytometry, 2×10⁵ cells were incubated with 200 nM of the CDH19 4A2 antibody that was conjugated to PE at a 1:1 ratio. The incubation and subsequent wash steps were performed in the presence of 1.2 mM calcium. A tube of QuantiBRITE PE lyophilized beads with four levels of PE (BD, cat#340495) was simultaneously prepared according to the manufacturer's instructions. The beads were analyzed by flow cytometry to generate a standard curve. The PE median values obtained from the melanoma lines after FACS analysis were then calibrated against the standard curve to calculate the antibodies bound per cell (ABC), which provides an estimate of the number of receptors on each cell. IHC was performed as described in Example 6 and the results are provided in FIG. 5. The melanoma cell line CHL-1 expresses about 10,000 CDH19 molecules on the cell surface, while Colo699 cells express about 5,000 receptors. Both cell lines represent tumors with medium to high expression levels based on IHC. Expression in A2058 is very low, while LOX cells do not express any detectable CDH19 protein.

### Example 8

### Bispecific Binding and Interspecies Cross-Reactivity

[0469] For confirmation of binding to human CDH19 and to human and macaque CD3, bispecific antibodies were tested by flow cytometry using indicated cell lines. L1.2 transfected with human CDH19, the human melanoma cell lines CHL-1 and A2058 expressing native human CDH19, CD3-expressing human T cell leukemia cell line HPB-ALL (DSMZ, Braunschweig, ACC483) and the CD3-expressing macaque T cell line 4119LnPx (Knappe A, et al., Blood, 2000, 95, 3256-3261) were used as antigen positive cell lines. Moreover, untransfected L1.2 cells were used as negative control.

[0470] For flow cytometry 200,000 cells of the respective cell lines were incubated for 30 min on ice with 50 μl of purified bispecific antibody at a concentration of 5 μg/ml. The cells were washed twice in PBS/2% FCS and binding of the constructs was detected with a murine PentaHis antibody (Qiagen; diluted 1:20 in 50 μl PBS/2% FCS). After washing, bound PentaHis antibodies were detected with an Fc gamma-specific antibody (Dianova) conjugated to phycoerythrin, diluted 1:100 in PBS/2% FCS. Samples were measured by flow cytometry on a FACSCanto II instrument and analyzed by FACSDiva software (both from Becton Dickinson).

[0471] The CDH19/CD3 bispecific antibodies stained L1.2 cells transfected with human CDH19, the human CDH19-expressing melanoma cell lines CHL-1 and A2058 as well as human and macaque T cells. Moreover, there was no staining of untransfected L1.2 cells (see FIG. 6).

### Example 9

### Cytotoxic Activity

[0472] FACS-based cytotoxicity assay with unstimulated human PBMC

### Isolation of Effector Cells

[0473] Human peripheral blood mononuclear cells (PBMC) were prepared by Ficoll density gradient centrifugation from enriched lymphocyte preparations (e.g. buffy coats), a side product of blood banks collecting blood for transfusions. Buffy coats were supplied by a local blood bank and PBMC were prepared on the same day of blood collection. After Ficoll density centrifugation and extensive washes with Dulbecco's PBS (Gibco), remaining erythrocytes were removed from PBMC via incubation with erythrocyte lysis buffer (155 mM NH₄Cl, 10 mM KHCO₃, 100 μM EDTA). Platelets were removed via the supernatant upon centrifugation of PBMC at 100×g. Remaining lymphocytes mainly encompass B and T lymphocytes, NK cells and monocytes. PBMC were kept in culture at 37° C./5% CO₂ in RPMI medium (Gibco) with 10% FCS (Gibco).

Depletion of CD14⁺ and CD56⁺ cells

[0474] For depletion of CD14⁺ cells, human CD14 MicroBeads (Milteny Biotec, MACS, #130-050-201) were used, for depletion of NK cells human CD56 MicroBeads (MACS, #130-050-401). PBMC were counted and centrifuged for 10 min at room temperature with 300×g. The supernatant was discarded and the cell pellet resuspended in MACS isolation buffer [80 μL/10⁷ cells; PBS (Invitrogen, #20012-043), 0.5% (v/v) FBS (Gibco, #10270-106), 2 mM EDTA (Sigma-Aldrich, #E-6511)]. CD14 MicroBeads and CD56 MicroBeads (20 μL/10⁷ cells) were added and incubated for 15 min at 4-8° C. The cells were washed with MACS isolation buffer (1-2 mL/10⁷ cells). After centrifugation (see above), supernatant was discarded and cells resuspended in MACS isolation buffer (500 μL/10⁸ cells). CD14/CD56 negative cells were then isolated using LS Columns (Miltenyi Biotec, #130-042-401). PBMC w/o CD14+/CD56+ cells were cultured in RPMI complete medium i.e. RPMI1640 (Biochrom AG, #FG1215) supplemented with 10% FBS (Biochrom AG, #S0115), 1× non-essential amino acids (Biochrom AG, #K0293), 10 mM Hepes buffer (Biochrom AG, #L1613), 1 mM sodium pyruvate (Biochrom AG, #L0473) and 100 U/mL penicillin/streptomycin (Biochrom AG, #A2213) at 37° C. in an incubator until needed.

### Target Cell Labeling

[0475] For the analysis of cell lysis in flow cytometry assays, the fluorescent membrane dye DiOC₁₈ (DiO) (Molecular Probes, #V22886) was used to label human CDH19− as target cells and distinguish them from effector cells. Briefly, cells were harvested, washed once with PBS and adjusted to 10⁶ cell/mL in PBS containing 2% (v/v) FBS and the membrane dye DiO (5 μL/10⁶ cells). After incubation for 3 min at 37° C., cells were washed twice in complete RPMI medium and the cell number adjusted to 1.25×10⁶ cells/mL. The vitality of cells was determined using 0.5% (v/v) isotonic EosinG solution (Roth, #45380).

### Flow Cytometry Based Analysis

[0476] This assay was designed to quantify the lysis of human CDH19-transfected CHO cells in the presence of serial dilutions of CDH19 bispecific antibodies.

[0477] Equal volumes of DiO-labeled target cells and effector cells (i.e., PBMC w/o CD14⁺ cells) were mixed, resulting in an E:T cell ratio of 10:1. 160 μL of this suspension were transferred to each well of a 96-well plate. 40 μL of serial dilutions of the CDH19 bispecific antibodies and a negative control bispecific (an CD3-based bispecific antibody recognizing an irrelevant target antigen) or RPMI complete medium as an additional negative control were added. The bispecific antibody-mediated cytotoxic reaction proceeded for 48 hours in a 7% CO₂ humidified incubator. Then cells were transferred to a new 96-well plate and loss of target cell membrane integrity was monitored by adding propidium iodide (PI) at a final concentration of 1 μg/mL. PI is a membrane impermeable dye that normally is excluded from viable cells, whereas dead cells take it up and become identifiable by fluorescent emission.

[0478] Samples were measured by flow cytometry on a FACSCanto II instrument and analyzed by FACSDiva software (both from Becton Dickinson).

[0479] Target cells were identified as DiO-positive cells. PI-negative target cells were classified as living target cells. Percentage of cytotoxicity was calculated according to the following formula:

$$Cytotoxicity [ \% ] = \frac{{n}_{dead target cells}}{{n}_{target cells}} \times 100$$

$$n = number of events$$

[0480] Using GraphPad Prism 5 software (Graph Pad Software, San Diego), the percentage of cytotoxicity was plotted against the corresponding bispecific antibody concentrations. Dose response curves were analyzed with the four parametric logistic regression models for evaluation of sigmoid dose response curves with fixed hill slope and EC50 values were calculated. The results are shown in FIG. 7.

### Example 10

### In Vivo Tumor Growth Inhibition Experiments

[0481] 5 million Colo699 or CHL-1 tumor cells were admixed with 2.5 million freshly isolated peripheral blood mononuclear cells (PBMC) and injected subcutaneously in the left flank of female athymic nude mice on Day 0. The same day, mice were treated intraperitoneally with either CDH19 BiTE 2G6 or non-specific control BiTE (MEC14) at the indicated doses. Dosing continued daily for the first 10 days post-tumor inoculation.

[0482] Tumor volumes and body weights were measured twice per week using calipers and an analytical scale, respectively.

[0483] The results of experiments with Colo699 or CHL-1 tumor cells are shown in FIGS. 8 and 9.

### Sequence Table:

TABLE Ia
HEAVY CHAIN CDRs

| Ab | Type | CDR 1 | CDR 2 | CDR 3 |
|---|---|---|---|---|
| 1D10 | NA | AGCTATGGCATGCAC | GTTATATGGTATGATGGAAGT | AGGGCCGGTATAATAGGAAC |
| 2C12 | A | | ATAAATACTATGCAGACTCC | TACAGGCTACTACTACGGTA |
| | | | GTGAAGGGC | TGGACGTC |
| | | SEQ ID NO: 1 | SEQ ID NO: 2 | SEQ ID NO: 3 |
| | AA | SYGMH | VIWYDGSNKYYADSVKG | RAGIIGTTGYYYGMDV |
| | | SEQ ID NO: 4 | SEQ ID NO: 5 | SEQ ID NO: 6 |
| 1F10 | NA | AGTGGTGGTTACTACT | TACATCTATTACAGTGGGAGC | GATGGAAGCAGTGGCTGGTA |
| | | GGAGC | ACCTACTACAACCCGTCCCTC | CTTCCAGCAC |
| | | | ACGAGT | |
| | | SEQ ID NO: 7 | SEQ ID NO: 8 | SEQ ID NO: 9 |
| | AA | SGGYYWS | YIYYSGSTYYNPSLTS | DGSSGWYFQH |
| | | SEQ ID NO: 10 | SEQ ID NO: 11 | SEQ ID NO: 12 |
| 2C12_LC#1 | NA | AGCTATGGCATGCAC | GTTATATGGTATGATGGAAGT | AGGGCCGGTATAATAGGAAC |
| | | | AATAAATACTATGCAGACTCC | TACAGGCTACTACTACGGTA |
| | | | GTGAAGGGC | TGGACGTC |
| | | SEQ ID NO: 13 | SEQ ID NO: 14 | SEQ ID NO: 15 |
| | AA | SYGMH | VIWYDGSNKYYADSVKG | RAGIIGTTGYYYGMDV |
| | | SEQ ID NO: 16 | SEQ ID NO: 17 | SEQ ID NO: 18 |
| 2G6_LC#1 | NA | AGCTATGGCATGCAC | TTTATATGGTATGATGGAAGT | AGGGCCGGTATAATAGGAAC |
| | | | AATAAATACTATGCAGACTCC | TATAGGCTACTACTACGGTA |
| | | | GTGAAGGAC | TGGACGTC |
| | | SEQ ID NO: 19 | SEQ ID NO: 20 | SEQ ID NO: 21 |
| | AA | SYGMH | FIWYDGSNKYYADSVKD | RAGIIGTIGYYYGMDV |
| | | SEQ ID NO: 22 | SEQ ID NO: 23 | SEQ ID NO: 24 |
| 2G6 | NA | AGCTATGGCATGCAC | TTTATATGGTATGATGGAAGT | AGGGCCGGTATAATAGGAAC |
| | | | AATAAATACTATGCAGACTCC | TATAGGCTACTACTACGGTA |
| | | | GTGAAGGAC | TGGACGTC |
| | | SEQ ID NO: 25 | SEQ ID NO: 26 | SEQ ID NO: 27 |
| | AA | SYGMH | FIWYDGSNKYYADSVKD | RAGIIGTIGYYYGMDV |
| | | SEQ ID NO: 28 | SEQ ID NO: 29 | SEQ ID NO: 30 |
| 2H12 | NA | AGCTATGGCATGCAC | GTTATATGGTATGATGGAAGT | AGGGCCGGTATAATAGGAAC |
| | | | AATAAATACTATACAGACTCC | TACAGGCTACTACTACGGTA |
| | | | GTGAAGGGC | TGGACGTC |
| | | SEQ ID NO: 31 | SEQ ID NO: 32 | SEQ ID NO: 33 |
| | AA | SYGMH | VIWYDGSNKYYTDSVKG | RAGIIGTTGYYYGMDV |
| | | SEQ ID NO: 34 | SEQ ID NO: 35 | SEQ ID NO: 36 |
| 2H12_LC#2 | NA | AGCTATGGCATGCAC | GTTATATGGTATGATGGAAGT | AGGGCCGGTATAATAGGAAC |
| | | | AATAAATACTATACAGACTCC | TACAGGCTACTACTACGGTA |
| | | | GTGAAGGGC | TGGACGTC |
| | | SEQ ID NO: 37 | SEQ ID NO: 38 | SEQ ID NO: 39 |
| | AA | SYGMH | VIWYDGSNKYYTDSVKG | RAGIIGTTGYYYGMDV |
| | | SEQ ID NO: 40 | SEQ ID NO: 41 | SEQ ID NO: 42 |
| 4A2 | NA | AGTAGTGGTTACTACT | TACATCTATTACACTGGGAGC | GATGGAAGCAGTGGCTGGTA |
| 5B4 | | GGAGC | GCCTACTACAACCCGTCCCTC | CTTCCAGTAT |
| 5C5 | | | AAGAGT | |
| | | SEQ ID NO: 43 | SEQ ID NO: 44 | SEQ ID NO: 45 |
| | AA | SSGYYWS | YIYYTGSAYYNPSLKS | DGSSGWYFQY |
| | | SEQ ID NO: 46 | SEQ ID NO: 47 | SEQ ID NO: 48 |
| 4A9 | NA | GGTTACTACTGGAGC | TATTTCTCTTACAGTGGGAGC | AACTGGGCCTTCCACTTTGA |
| | | | ACCAACTACAACCCCTCCCTC | CTTC |
| | | | AAGAGT | |
| | | SEQ ID NO: 49 | SEQ ID NO: 50 | SEQ ID NO: 51 |
| | AA | GYYWS | YFSYSGSTNYNPSLKS | NWAFHFDF |
| | | SEQ ID NO: 52 | SEQ ID NO: 53 | SEQ ID NO: 54 |
| 4B10 | NA | AGCTATGACATGCAC | GTTATATCATATGATGGAACT | GAACGATATTTTGACTGGTC |
| 4C2 | | | AATGAATACTATGCAGACTCC | TTTTGACTAC |
| | | | GTGAAGGGC | |
| | | SEQ ID NO: 55 | SEQ ID NO: 56 | SEQ ID NO: 57 |
| | AA | SYDMH | VISYDGTNEYYADSVKG | ERYFDWSFDY |
| | | SEQ ID NO: 58 | SEQ ID NO: 59 | SEQ ID NO: 60 |
| 4D2 | NA | AGTTATGACATGCAC | GTTATATCATATGATGGAACT | GAACGATATTTTGACTGGTC |
| | | | AATGAATACTATGCAGACTCC | TTTTGACTAC |
| | | | GTGAAGGGC | |
| | | SEQ ID NO: 61 | SEQ ID NO: 62 | SEQ ID NO: 63 |
| | AA | SYDMH | VISYDGTNEYYADSVKG | ERYFDWSFDY |
| | | SEQ ID NO: 64 | SEQ ID NO: 65 | SEQ ID NO: 66 |
| 4D3 | NA | AGCTATGACATGGAC | GTTATATGGTATGATGGAAGT | GAAACTGGGGAGGgCTGGTA |
| 4F3 | | | AATAAAtacTATGCAGACTCC | CTTCGAtctc |
| | | | GTGAGGGGC | |
| | | SEQ ID NO: 67 | SEQ ID NO: 68 | SEQ ID NO: 69 |
| | AA | SYDMD | VIWYDGSNKYYADSVRG | ETGEGWYFDL |
| | | SEQ ID NO: 70 | SEQ ID NO: 71 | SEQ ID NO: 72 |
| 4E10 | NA | AGCTATGACATGCAC | GTTATATGGTATGATGGAAGT | GAGTATAGGTACAGCTGGTA |
| | | | AATAAATACTATGCAGACTCC | CTTTGACTAC |
| | | | GTGAAGGGC | |
| | | SEQ ID NO: 73 | SEQ ID NO: 74 | SEQ ID NO: 75 |
| | AA | SYDMH | VIWYDGSNKYYADSVKG | EYRYSWYFDY |
| | | SEQ ID NO: 76 | SEQ ID NO: 77 | SEQ ID NO: 78 |
| 4F7 | NA | AGTTACTCCTGGAGC | TATATCTATTACAGTGGGAGC | AACTGGGCCTTCCACTTTGA |
| | | | ACCAACTACAACCCCTCCCTC | CTAC |
| | | | AAGAGT | |
| | | SEQ ID NO: 79 | SEQ ID NO: 80 | SEQ ID NO: 81 |
| | AA | SYSWS | YIYYSGSTNYNPSLKS | NWAFHFDY |
| | | SEQ ID NO: 82 | SEQ ID NO: 83 | SEQ ID NO: 84 |
| 5E3 | NA | AGCTATAGCATGCAC | TCCATTAGTAGTAGTAGTAGT | GGGGAAACTGGAACTAACTA |
| | | | TACATATACTACGCAGACTCA | CTACTACTACGGTATGGACG |
| | | | GTGAAGGGC | TC |
| | | SEQ ID NO: 85 | SEQ ID NO: 86 | SEQ ID NO: 87 |
| | AA | SYSMH | SISSSSSYIYYADSVKG | GETGTNYYYYGMDV |
| | | SEQ ID NO: 88 | SEQ ID NO: 89 | SEQ ID NO: 90 |
| 17H8 | NA | AGTTACTACTGGAGC | TATATCTATTACATTGGGAGC | GATTCCCGGTATAGAAGTGG |
| 23B6 | | | ACCAACTACAACCCCTCCCTC | CTGGTACGATGCTTTTGATA |
| 28D10 | | | AAGAGT | TC |
| | | SEQ ID NO: 91 | SEQ ID NO: 92 | SEQ ID NO: 93 |
| | AA | SYYWS | YIYYIGSTNYNPSLKS | DSRYRSGWYDAFDI |
| | | SEQ ID NO: 94 | SEQ ID NO: 95 | SEQ ID NO: 96 |
| 16C1 | NA | GGTTACTACTGGAGC | TATATCTATTACATTGGGAGC | GATGGGAGCAGTGGCTGGTA |
| | | | ACCAACTACAACCCCTCCCTC | CCGGTGGTTCGACCCC |
| | | | AAGAGT | |
| | | SEQ ID NO: 97 | SEQ ID NO: 98 | SEQ ID NO: 99 |
| | AA | GYYWS | YIYYIGSTNYNPSLKS | DGSSGWYRWFDP |
| | | SEQ ID NO: 100 | SEQ ID NO: 101 | SEQ ID NO: 102 |
| 16A4 | NA | AGTTACTACTGGAGC | TATATCTATTACAGTGGGAGC | GATCAAAGGCGGATAGCAGC |
| | | | ACCAATTACAACCCCTCCCTC | AGCTGGTACCCACTTCTACG |
| | | | AAGAGT | GTATGGACGTC |
| | | SEQ ID NO: 103 | SEQ ID NO: 104 | SEQ ID NO: 105 |
| | AA | SYYWS | YIYYSGSTNYNPSLKS | DQRRIAAAGTHFYGMDV |
| | | SEQ ID NO: 106 | SEQ ID NO: 107 | SEQ ID NO: 108 |
| 16E2 | NA | AGCTATGGCATGCAC | GTGATATGGTATGATGGAAGT | GACGGGTGGGAGCTGTCCTT |
| 17E10 | | | AATAAATACTATGCAGACTCC | TGACTAC |
| 20B12 | | | GTGAAGGGC | |
| | | SEQ ID NO: 109 | SEQ ID NO: 110 | SEQ ID NO: 111 |
| | AA | SYGMH | VIWYDGSNKYYADSVKG | DGWELSFDY |
| | | SEQ ID NO: 112 | SEQ ID NO: 113 | SEQ ID NO: 114 |
| 22G10 | NA | AGTTATGCCATGAAC | ACTATTAGTGGTGGTGGTGCT | GGGGGAATGGGGGGATACTA |
| | | | AACACATACTACGCAGACTCC | CTACGGTATGGACGTC |
| | | | GTGAAGGGC | |
| | | SEQ ID NO: 115 | SEQ ID NO: 116 | SEQ ID NO: 117 |
| | AA | SYAMN | TISGGGANTYYADSVKG | GGMGGYYYGMDV |
| | | SEQ ID NO: 118 | SEQ ID NO: 119 | SEQ ID NO: 120 |
| 16H2 | NA | AGCTACTTTATTCAC | ATAATCAACCCTATTAGTGTT | GGGGGGATACAGCTATGGTT |
| 20D3 | | | AGCACAAGCTACGCACAGAAG | ACATTTTGACTAC |
| 23E7 | | | TTCCAGGGC | |
| | | SEQ ID NO: 121 | SEQ ID NO: 122 | SEQ ID NO: 123 |
| | AA | SYFIH | IINPISVSTSYAQKFQG | GGIQLWLHFDY |
| | | SEQ ID NO: 124 | SEQ ID NO: 125 | SEQ ID NO: 126 |
| 22D1 | NA | AGCTACTTTATTCAC | ATAATCAACCCTATTAGTGTT | GGGGGGATACAGCTATGGTT |
| | | | AGCACAAGCTACGCACAGAAG | ACATTTGGACTAC |
| | | | TTCCAGGGC | |
| | | SEQ ID NO: 127 | SEQ ID NO: 128 | SEQ ID NO: 129 |
| | AA | SYFIH | IINPISVSTSYAQKFQG | GGIQLWLHLDY |
| | | SEQ ID NO: 130 | SEQ ID NO: 131 | SEQ ID NO: 132 |
| 25F8 | NA | AGCTACTATATTCAC | ATAATCAACCCCAGTGGTGGT | GGGGGAATACAGCTATGGTT |
| | | | AGCACAAGGTACGCACAGAAG | ACATTttGACTAC |
| | | | TTCCAGGGC | |
| | | SEQ ID NO: 133 | SEQ ID NO: 134 | SEQ ID NO: 135 |
| | AA | SYYIH | IINPSGGSTRYAQKFQG | GGIQLWLHFDY |
| | | SEQ ID NO: 136 | SEQ ID NO: 137 | SEQ ID NO: 138 |
| 26F12 | NA | AACTACTATATGTCC | ATAATCAACCCTAGTGGTGGT | GGGGGGATACAACTATGGTT |
| 27B3 | | | GACTCAACCTACGCACAGAAG | ACATTTTGACTAC |
| | | | TTCCAGGGC | |
| | | SEQ ID NO: 139 | SEQ ID NO: 140 | SEQ ID NO: 141 |
| | AA | NYYMS | IINPSGGDSTYAQKFQG | GGIQLWLHFDY |
| | | SEQ ID NO: 142 | SEQ ID NO: 143 | SEQ ID NO: 144 |
| 26D1 | NA | AGCTACTATATGTCC | ATAATCCACCCTAGTGGTGGT | GGGGGGATAAAACTATGGTT |
| | | | GACACAACCTACGCACAGAAG | ACATTTTGACTAT |
| | | | TTCCAGGGC | |
| | | SEQ ID NO: 145 | SEQ ID NO: 146 | SEQ ID NO: 147 |
| | AA | SYYMS | IIHPSGGDTTYAQKFQG | GGIKLWLHFDY |
| | | SEQ ID NO: 148 | SEQ ID NO: 149 | SEQ ID NO: 150 |
| 25G10 | NA | GGTTACTACTGGAGC | TATATCTATTACATTGGGAGC | GATGGGAGCAGTGGCTGGTA |
| | | | ACCAACTACAACCCCTCCCTC | CCGGTGGTTCGACCCC |
| | | | AAGAGT | |
| | | SEQ ID NO: 151 | SEQ ID NO: 152 | SEQ ID NO: 153 |
| | AA | GYYWS | YIYYIGSTNYNPSLKS | DGSSGWYRWFDP |
| | | SEQ ID NO: 154 | SEQ ID NO: 155 | SEQ ID NO: 156 |
| 23A10 | NA | CGCTATGGCATACAC | GTTATATGGTATGATGGAAGT | AGGGCCGGTATACCTGGAAC |
| | | | AATAAATACTATGCAGACTCC | TACGGGCTACTACTATGGTA |
| | | | GTGAAGGGC | TGGACGTC |
| | | SEQ ID NO: 157 | SEQ ID NO: 158 | SEQ ID NO: 159 |
| | AA | RYGIH | VIWYDGSNKYYADSVKG | RAGIPGTTGYYYGMDV |
| | | SEQ ID NO: 160 | SEQ ID NO: 161 | SEQ ID NO: 162 |
| 19B5 | NA | AGCTACTTTATTCAC | ATTATCAACCCTATTAGTGTT | GGGGGGATACAGCTATGGTT |
| | | | AGCACAAGCTACGCACAGAAG | ACATTTGGACTAC |
| | | | TTCCAGGGC | |
| | | SEQ ID NO: 163 | SEQ ID NO: 164 | SEQ ID NO: 165 |
| | AA | SYFIH | IINPISVSTSYAQKFQG | GGIQLWLHLDY |
| | | SEQ ID NO: 166 | SEQ ID NO: 167 | SEQ ID NO: 168 |

TABLE Ib
LIGHT CHAIN CDRs

| Ab | Type | CDR 1 | CDR 2 | CDR 3 |
|---|---|---|---|---|
| 1D10 | NA | TCTGGAGATAGATTGG | CAAGATACCAAGCGGCCCTCA | CAGGCGTGGGACAGCAGCAC |
| 2C12 | | GGGAAAAATATACTTGC | | TGTGGTA |
| | | SEQ ID NO: 169 | SEQ ID NO: 170 | SEQ ID NO: 171 |
| | AA | SGDRLGEKYTC | QDTKRPS | QAWDSSTVV |
| | | SEQ ID NO: 172 | SEQ ID NO: 173 | SEQ ID NO: 174 |
| 1F10 | NA | AGGGCCAGTCGGAGTA | GGTCCATCCAGCAGGGCCACT | CAGCAGTATGGTAGCTCATT |
| | | TTAGCAGCAGCTACTT | | CACT |
| | | AGCC | | |
| | | SEQ ID NO: 175 | SEQ ID NO: 176 | SEQ ID NO: 177 |
| | AA | RASRSISSSYLA | GPSSRAT | QQYGSSFT |
| | | SEQ ID NO: 178 | SEQ ID NO: 179 | SEQ ID NO: 180 |
| 2C12_LC#1 | NA | AGGtCTAGTCAAAGcc | AAGGTTTCTAACTGGGactct | ATGCAAGGTATAGTGTGGCC |
| | | tcgtaTACAGTGATGG | | GTGCAGT |
| | | AAACAcctACTTGAAT | | |
| | | SEQ ID NO: 181 | SEQ ID NO: 182 | SEQ ID NO: 183 |
| | AA | RSSQSLVYSDGNTYLN | KVSNWDS | MQGIVWPCS |
| | | SEQ ID NO: 184 | SEQ ID NO: 185 | SEQ ID NO: 186 |
| 2G6_LC#1 | NA | AGGTCTAGTCAAAGCC | CAGGTTTCTAACTGGGACTCT | ATGCAAGATACACTGTGGCC |
| | | TCGTATACAGTGATGG | | GTGCAGT |
| | | AAACACCTACTTGAAT | | |
| | | SEQ ID NO: 187 | SEQ ID NO: 188 | SEQ ID NO: 189 |
| | AA | RSSQSLVYSDGNTYLN | QVSNWDS | MQDTLWPCS |
| | | SEQ ID NO: 190 | SEQ ID NO: 191 | SEQ ID NO: 192 |
| 2G6 | NA | TCTGGAGATAGGTTGG | CAAGATACCAAGCGGCCCTCA | CAGGCGTGGGACAGCAGCAC |
| | | GGGAAAAATATACTTGC | | TGTGGTA |
| | | SEQ ID NO: 193 | SEQ ID NO: 194 | SEQ ID NO: 195 |
| | AA | SGDRLGEKYTC | QDTKRPS | QAWDSSTVV |
| | | SEQ ID NO: 196 | SEQ ID NO: 197 | SEQ ID NO: 198 |
| 2H12 | NA | TCTGGAGATAGATTGG | CAAGATACCAAGCGGCCCTCA | CAGGCGTGGGACAGCAGCAC |
| | | GGGAAAAATATACTTGC | | TGTGGTA |
| | | SEQ ID NO: 199 | SEQ ID NO: 200 | SEQ ID NO: 201 |
| | AA | SGDRLGEKYTC | QDTKRPS | QAWDSSTVV |
| | | SEQ ID NO: 202 | SEQ ID NO: 203 | SEQ ID NO: 204 |
| 2H12_LC#2 | NA | AGGTCTAGTCAAAGCC | AAGGTTTCTAACTGGGACTCT | ATGCAAGATACACTGTGGCC |
| | | TCGTATACAGTGATGG | | GTGCAGT |
| | | AAACACCTACTTGAAT | | |
| | | SEQ ID NO: 205 | SEQ ID NO: 206 | SEQ ID NO: 207 |
| | AA | RSSQSLVYSDGNTYLN | KVSNWDS | MQDTLWPCS |
| | | SEQ ID NO: 208 | SEQ ID NO: 209 | SEQ ID NO: 210 |
| 4A2 | NA | AGGgcCAGTCGGAATA | GGTCCATCCAGCAGGGccaCT | CAGCAGTATGGtagctCATT |
| 5B4 | | TTAGCAGCAGCTACtt | | CACT |
| 5C5 | | aGCC | | |
| | | SEQ ID NO: 211 | SEQ ID NO: 212 | SEQ ID NO: 213 |
| | AA | RASRNISSSYLA | GPSSRAT | QQYGSSFT |
| | | SEQ ID NO: 214 | SEQ ID NO: 215 | SEQ ID NO: 216 |
| 4A9 | NA | ACTGGGAGCAGCTCCA | GGTAACAACAATCGGCCCTCA | CAGTCCTATGACAGCagACT |
| | | ACATCGGGACAGGTTA | | GAGTGGTTGGGTG |
| | | TGCTGTACAC | | |
| | | SEQ ID NO: 217 | SEQ ID NO: 218 | SEQ ID NO: 219 |
| | AA | TGSSSNIGTGYAVH | GNNNRPS | QSYDSRLSGWV |
| | | SEQ ID NO: 220 | SEQ ID NO: 221 | SEQ ID NO: 222 |
| 4B10 | NA | AGGGCCAGTCAGAGTG | GGTGCATCCAGCAGGGCCACT | CAGCAGTACAGTAACTCgtg |
| 4C2 | | TTAGCAACACCTACTT | | GACG |
| | | AGCC | | |
| | | SEQ ID NO: 223 | SEQ ID NO: 224 | SEQ ID NO: 225 |
| | AA | RASQSVSNTYLA | GASSRAT | QQYSNSWT |
| | | SEQ ID NO: 226 | SEQ ID NO: 227 | SEQ ID NO: 228 |
| 4D2 | NA | AGGGCCAGTCAGAGTG | GGTGCATCCAGCAGGGCCGCT | CagcagTATAGTAacTcgtg |
| | | TTAGCAACACCTACTT | | GACG |
| | | AGCC | | |
| | | SEQ ID NO: 229 | SEQ ID NO: 230 | SEQ ID NO: 231 |
| | AA | RASQSVSNTYLA | GASSRAA | QQYSNSWT |
| | | SEQ ID NO: 232 | SEQ ID NO: 233 | SEQ ID NO: 234 |
| 4D3 | NA | AGGGCCAGTCAGAGTG | GGTGCATCCAGCAGGGCCACT | CAGCAGTATGGTAGCTCGTG |
| 4F3 | | TTAGCAGCAGCTACTT | | GACG |
| | | AGCC | | |
| | | SEQ ID NO: 235 | SEQ ID NO: 236 | SEQ ID NO: 237 |
| | AA | RASQSVSSSYLA | GASSRAT | QQYGSSWT |
| | | SEQ ID NO: 238 | SEQ ID NO: 239 | SEQ ID NO: 240 |
| 4E10 | NA | AGGGCCAGTCAGAGTG | GGTGCATCCAGCAGGGTCACT | CAGCAATATAGTAACTCGTG |
| | | TTGGCAGCAGCTACTT | | GACG |
| | | AGCC | | |
| | | SEQ ID NO: 241 | SEQ ID NO: 242 | SEQ ID NO: 243 |
| | AA | RASQSVGSSYLA | GASSRVT | QQYSNSWT |
| | | SEQ ID NO: 244 | SEQ ID NO: 245 | SEQ ID NO: 246 |
| 4F7 | NA | ACTGGGAGCAGCTCCA | GGTAACAGCAATCGGCCCTCA | CAGTCCTATGACAGCAGTCT |
| | | ATATCGGGACAGGTTA | | GAGTGGTTGGGTG |
| | | TGATGTACAC | | |
| | | 0SEQ ID NO: 247 | SEQ ID NO: 248 | SEQ ID NO: 249 |
| | AA | TGSSSNIGTGYDVH | GNSNRPS | QSYDSSLSGWV |
| | | SEQ ID NO: 250 | SEQ ID NO: 251 | SEQ ID NO: 252 |
| 5E3 | NA | TCTGGAGATAAATTGG | CAAGATAGCAAGCGGCCCTCA | CAGGCGTGGGACAGCAGCAC |
| | | GGGATGAATATGCTTGC | | TGTGGTA |
| | | SEQ ID NO: 253 | SEQ ID NO: 254 | SEQ ID NO: 255 |
| | AA | SGDKLGDEYAC | QDSKRPS | QAWDSSTVV |
| | | SEQ ID NO: 256 | SEQ ID NO: 257 | SEQ ID NO: 258 |
| 17H8 | NA | AGGGCCAGTCAGAGTG | GGTGCATCCAGCAGGGCCACT | CAGCAGTATGGTAAATCACC |
| 23B6 | | TTGCCGGCAGCTACCT | | GATCACC |
| 28D10 | | AGCC | | |
| | | SEQ ID NO: 259 | SEQ ID NO: 260 | SEQ ID NO: 261 |
| | AA | RASQSVAGSYLA | GASSRAT | QQYGKSPIT |
| | | SEQ ID NO: 262 | SEQ ID NO: 263 | SEQ ID NO: 264 |
| 16C1 | NA | AGGGCCAGCCAGAGTG | GGTGCATCCAGCAGGGCCACT | CAGCAGTATGGTAACTCACC |
| | | TTAGCAGCAGCTACTT | | GCTCACT |
| | | AGCC | | |
| | | SEQ ID NO: 265 | SEQ ID NO: 266 | SEQ ID NO: 267 |
| | AA | RASQSVSSSYLA | GASSRAT | QQYGNSPLT |
| | | SEQ ID NO: 268 | SEQ ID NO: 269 | SEQ ID NO: 270 |
| 16A4 | NA | AGGGCCAGTCAGAGTG | GGTACATCCAGCAGGGCCACT | CAGCAGTACGGTAGCTCACC |
| | | TTAGCAGCAGTTATTT | | TTTCACT |
| | | AGCC | | |
| | | SEQ ID NO: 271 | SEQ ID NO: 272 | SEQ ID NO: 273 |
| | AA | RASQSVSSSYLA | GTSSRAT | QQYGSSPFT |
| | | SEQ ID NO: 274 | SEQ ID NO: 275 | SEQ ID NO: ***276 |
| 16E2 | NA | CGGGCGAGTCAGGGCA | GCTGCATCCAGTTTGCAAAGT | CAACACTATTTTACTTACCC |
| 17E10 | | TTAGCAATTATTTAGC | | TCGGACG |
| 20B12 | | SEQ ID NO: 277 | SEQ ID NO: 278 | SEQ ID NO: 279 |
| | AA | RASQGISNYLA | AASSLQS | QHYFTYPRT |
| | | SEQ ID NO: 280 | SEQ ID NO: 281 | SEQ ID NO: 282 |
| 22G10 | NA | AGGGCCAGTCAGAGTA | GGTGCATTTACCAGGGCCACT | CAGCAGTATAATTACTGGCC |
| | | TTAGCAGCAACTTAGC | | GCTCACT |
| | | SEQ ID NO: 283 | SEQ ID NO: 284 | SEQ ID NO: 285 |
| | AA | RASQSISSNLA | GAFTRAT | QQYNYWPLT |
| | | SEQ ID NO: 286 | SEQ ID NO: 287 | SEQ ID NO: 288 |
| 16H2 | NA | TCTGGAAGCAGCTCCA | ACTAATAATCAGCGGCCCTCA | GCAACATGGGATGACAGCCT |
| 20D3 | | ACATCGGAAGTAATTT | | GAATGGTTGGGTG |
| 23E7 | | TGTAAAC | | |
| | | SEQ ID NO: 289 | SEQ ID NO: 290 | SEQ ID NO: 291 |
| | AA | SGSSSNIGSNFVN | TNNQRPS | ATWDDSLNGWV |
| | | SEQ ID NO: 292 | SEQ ID NO: 293 | SEQ ID NO: 294 |
| 22D1 | NA | TCTGGAAGCAGCTCCA | ACTAATAATCAGCGGCCCTCA | GCAACATGGGATGACAGTAT |
| | | ACATCGGAAGCAATTT | | GAATGGTTGGGTG |
| | | TGTAAAC | | |
| | | SEQ ID NO: 295 | SEQ ID NO: 296 | SEQ ID NO: 297 |
| | AA | SGSSSNIGSNFVN | TNNQRPS | ATWDDSMNGWV |
| | | SEQ ID NO: 298 | SEQ ID NO: 299 | SEQ ID NO: 300 |
| 25F8 | NA | TCTGGAAGCAGCTCCA | ACTAATAATCAGCGGCCCTCA | GCAGCATGGGATGACAGCCT |
| | | ACATCGGAAGGAATTT | | GAATGGTTGGGTG |
| | | TGTAAAC | | |
| | | SEQ ID NO: 301 | SEQ ID NO: 302 | SEQ ID NO: 303 |
| | AA | SGSSSNIGRNFVN | TNNQRPS | AAWDDSLNGWV |
| | | SEQ ID NO: 304 | SEQ ID NO: 305 | SEQ ID NO: 306 |
| 26F12 | NA | TCTGGAAGCCGCTCCA | ACTAATTATCAGCGGCCCTCA | GCAGTATGGGATGACAGCCT |
| 27B3 | | ACATCGGAAGTAATTT | | GAATGGTTGGGTG |
| | | TGTAAAC | | |
| | | SEQ ID NO: 307 | SEQ ID NO: 308 | SEQ ID NO: 309 |
| | AA | SGSRSNIGSNFVN | TNYQRPS | AVWDDSLNGWV |
| | | SEQ ID NO: 310 | SEQ ID NO: 311 | SEQ ID NO: 312 |
| 26D1 | NA | TCTGGAAGCCGCTCCA | ACTAATAATCAGCGGCCCTCA | GCAGTATGGGATGACAGCCT |
| | | ACATCGGAAGTAATTT | | GAATGGTTGGGTG |
| | | TGTAAAC | | |
| | | SEQ ID NO: 313 | SEQ ID NO: 314 | SEQ ID NO: 315 |
| | AA | SGSRSNIGSNFVN | TNNQRPS | AVWDDSLNGWV |
| | | SEQ ID NO: 316 | SEQ ID NO: 317 | SEQ ID NO: 318 |
| 25G10 | NA | AGGGCCAGTCAGAGTG | GGTGCATCCAGCAGGGCCACT | CAGCAGTATGGTAACTCACC |
| | | TTAGCAGCAGCTACTT | | GCTCACT |
| | | AGCC | | |
| | | SEQ ID NO: 319 | SEQ ID NO: 320 | SEQ ID NO: 321 |
| | AA | RASQSVSSSYLA | GASSRAT | QQYGNSPLT |
| | | SEQ ID NO: 322 | SEQ ID NO: 323 | SEQ ID NO: 324 |
| 23A10 | NA | TCTGGAGATAGATTGG | CAAGATAATAAGTGGCCCTCA | CAGGCGTGGGACAGCAGcac |
| | | GGGAGAAATATGTTTGC | | TGTGGTA |
| | | SEQ ID NO: 325 | SEQ ID NO: 326 | SEQ ID NO: 327 |
| | AA | SGDRLGEKYVC | QDNKWPS | QAWDSSTVV |
| | | SEQ ID NO: 328 | SEQ ID NO: 329 | SEQ ID NO: 330 |
| 19B5 | NA | TCTGGAAGCAGGTCCA | ACTAATAATCAGCGGCCCTCA | GCAACATGGGATGACAGTAT |
| | | ACATCGGAAGCAATTT | | GAATGGTTGGGTG |
| | | TGTAAAC | | |
| | | SEQ ID NO: 331 | SEQ ID NO: 332 | SEQ ID NO: 333 |
| | AA | SGSRSNIGSNFVN | TNNQRPS | ATWDDSMNGWV |
| | | SEQ ID NO: 334 | SEQ ID NO: 335 | SEQ ID NO: 336 |

### Anti-CDH19 Variable Region Amino Acid Sequences and Polynucleotide Sequences

TABLE IIa
Heavy Chain Variable Region Polynucleotide and Amino acid Sequences

| SEQ | | | | |
|---|---|---|---|---|
| ID | | | | |
| NO. | DESIGNATION | SOURCE | TYPE | SEQUENCE |
| 337 | 17H8 | artificial | nt | CAGGTGCAGCTGCAGGAGTCGGGCCCAGGACTGGTGAAGCCTT |
| | 23B6 | | | CGGAGACCCTGTCCCTCACGTGCACTGTCTCTGGTGGCTCCAT |
| | 28D10 | | | CAATAGTTACTACTGGAGCTGGATCCGGCAGCCCCCAGGGAAG |
| | | | | GGACTGGAGTGGATTGGGTATATCTATTACATTGGGAGCACCA |
| | | | | ACTACAACCCCTCCCTCAAGAGTCGCGTCACCATATCAGTAGA |
| | | | | CACGTCCAAGAACCAGTTCTCCCTGAAGCTGAGCTCTGTGACC |
| | | | | GCTGCGGACACGGCCCTGTATTACTGTGCGAGAGATTCCCGGT |
| | | | | ATAGAAGTGGCTGGTACGATGCTTTTGATATCTGGGGCCAAGG |
| | | | | GACAATGGTCACCGTCTCTTCA |
| 338 | 17H8 | artificial | aa | QVQLQESGPGLVKPSETLSLTCTVSGGSINSYYWSWIRQPPGK |
| | 23B6 | | | GLEWIGYIYYIGSTNYNPSLKSRVTISVDTSKNQFSLKLSSVT |
| | 28D10 | | | AADTALYYCARDSRYRSGWYDAFDIWGQGTMVTVSS |
| 339 | 4A2 | artificial | nt | CAGGTGCAGCTGCAGGAGTCGGGCCCAGGACTGGTGAAGCCTT |
| | 5B4 | | | CACAGACCCTGTCCCTCACCTGCACTGTCTCTGGTGGCTCCAT |
| | 5C5 | | | CAGCAGTAGTGGTTACTACTGGAGCTGGATCCGCCAGCACCCA |
| | | | | GGGAAGGGCCTGGAGTGGATTGGGTACATCTATTACACTGGGA |
| | | | | GCGCCTACTACAACCCGTCCCTCAAGAGTCGAGTTACCATATC |
| | | | | AGTAGACACGTCTAAGAACCAGTTCTCCCTGAAGCTGAGCTCT |
| | | | | GTGACTGCCGCGGACACGGCCGTGTATTACTGTGCGAGAGATG |
| | | | | GAAGCAGTGGCTGGTACTTCCAGTATTGGGGCCAGGGCACCCT |
| | | | | GGTCACCGTCTCCTCA |
| 340 | 4A2 | artificial | aa | QVQLQESGPGLVKPSQTLSLTCTVSGGSISSSGYYWSWIRQHP |
| | 5B4 | | | GKGLEWIGYIYYTGSAYYNPSLKSRVTISVDTSKNQFSLKLSS |
| | 5C5 | | | VTAADTAVYYCARDGSSGWYFQYWGQGTLVTVSS |
| 341 | 16H2 | artificial | nt | CAGGTGCAGCTGGTGCAGTCTGGGGCTGAGGTGAAGAAGCCTG |
| | 20D3 | | | GGGCCTCAGTGAAGGTTTCCTGCAAGGTTTCTGGATACACCTT |
| | 23E7 | | | CACCAGCTACTTTATTCACTGGGTGCGCCAGGCCCCTGGACAA |
| | | | | GGGCTTGAGTGGATGGGAATAATCAACCCTATTAGTGTTAGCA |
| | | | | CAAGCTACGCACAGAAGTTCCAGGGCAGAGTCACCATGACCAG |
| | | | | GGACACGTCCACGAGCACAGTCTTCATGGAGCTGAGCAGCCTG |
| | | | | AGATCTGAGGACACGGCCGTGTATTACTGTGCGCGAGGGGGGA |
| | | | | TACAGCTATGGTTACATTTTGACTACTGGGGCCAGGGAACCCT |
| | | | | GGTCACCGTCTCCTCA |
| 342 | 16H2 | artificial | aa | QVQLVQSGAEVKKPGASVKVSCKVSGYTFTSYFIHWVRQAPGQ |
| | 20D3 | | | GLEWMGIINPISVSTSYAQKFQGRVTMTRDTSTSTVFMELSSL |
| | 23E7 | | | RSEDTAVYYCARGGIQLWLHFDYWGQGTLVTVSS |
| 343 | 26F12 | artificial | nt | CAGGTGCAGTTGGTGCAGTCTGGGGCTGAGGTGAAGAAGCCTG |
| | 27B3 | | | GGGCCTCAGTGAAGGTTTCCTGCAAGGCATCTAGATACACCTT |
| | | | | CACCAACTACTATATGTCCTGGGTGCGACAGGCCCCTGGACAA |
| | | | | GGGCTTGAGTGGATGGGAATAATCAACCCTAGTGGTGGTGACT |
| | | | | CAACCTACGCACAGAAGTTCCAGGGCAGACTCACCATGACCGG |
| | | | | GGACACGTCCACGAGCACAGTCTACATGGAGCTGAGCAGCCTG |
| | | | | AGATCTGAGGACACGGCCGTGTATTACTGTGCGAGAGGGGGGA |
| | | | | TACAACTATGGTTACATTTTGACTACTGGGGCCAGGGAACCCT |
| | | | | GGTCACCGTCTCCTCA |
| 344 | 26F12 | artificial | aa | QVQLVQSGAEVKKPGASVKVSCKASRYTFTNYYMSWVRQAPGQ |
| | 27B3 | | | GLEWMGIINPSGGDSTYAQKFQGRLTMTGDTSTSTVYMELSSL |
| | | | | RSEDTAVYYCARGGIQLWLHFDYWGQGTLVTVSS |
| 345 | 4B10 | artificial | nt | CAGGTGCAGTTGGTGGAGTCTGGGGGAGGCGTGGTCCAGCCTG |
| | 4C2 | | | GGAGGTCCCTGAGACTCTCCTGTGCAGCCTCTGGATTCACCTT |
| | | | | CAGTAGCTATGACATGCACTGGGTCCGCCAGGCTCCAGGCAAG |
| | | | | GGGCTGGAGTGGGTGGCAGTTATATCATATGATGGAACTAATG |
| | | | | AATACTATGCAGACTCCGTGAAGGGCCGATTCACCATCTCCAG |
| | | | | AGACACTTCCAAGAACACGCTGTATTTGCAAATGAACAGCCTG |
| | | | | AGAGCTGAGGACACGGCTGTATATTACTGTGCGAGAGAACGAT |
| | | | | ATTTTGACTGGTCTTTTGACTACTGGGGCCAGGGAACCCTGGT |
| | | | | CAGTGTCTCCTCA |
| 346 | 4B10 | artificial | aa | QVQLVESGGGVVQPGRSLRLSCAASGFTFSSYDMHWVRQAPGK |
| | 4C2 | | | GLEWVAVISYDGTNEYYADSVKGRFTISRDTSKNTLYLQMNSL |
| | | | | RAEDTAVYYCARERYFDWSFDYWGQGTLVSVSS |
| 347 | 4D3 | artificial | nt | CAGGTGCAGCTGGTGGAGTCTGGGGGAGGCGTGGTCCAGCCTG |
| | 4F3 | | | GGAGGTCCCTGAGACTCTCCTGTGCAGCGTCTGGATTCTCCTT |
| | | | | CAGTAGCTATGACATGGACTGGGTCCGCCAGACTCCAGGCAAG |
| | | | | GGGCTGGAGTGGGTGGCAGTTATATGGTATGATGGAAGTAATA |
| | | | | AATACTATGCAGACTCCGTGAGGGGCCGATTCACCATCTCCAG |
| | | | | AGACAATTCCAAGAACACGCTGTTTCTGCAAATGAACAGCCTG |
| | | | | AGAGTCGAGGACACGGCTGTGTATTACTGTGCGAGAGAAACTG |
| | | | | GGGAGGGCTGGTACTTCGATCTCTGGGGCCGTGGCACCCTGGT |
| | | | | CACTGTCTCCTCA |
| 348 | 4D3 | artificial | aa | QVQLVESGGGVVQPGRSLRLSCAASGFSFSSYDMDWVRQTPGK |
| | 4F3 | | | GLEWVAVIWYDGSNKYYADSVRGRFTISRDNSKNTLFLQMNSL |
| | | | | RVEDTAVYYCARETGEGWYFDLWGRGTLVTVSS |
| 349 | 16E2 | artificial | nt | CAGGTGCAGCTGGTGGAGTCTGGGGGAGGCGTGGTCCAGCCTG |
| | 17E10 | | | GGAGGTCCCTGAGACTCTCCTGTGCAGCGTCTGGATTCATCTT |
| | 20B12 | | | CAGTAGCTATGGCATGCACTGGGTCCGCCAGACTCCAGGCAAG |
| | | | | GGGCTGGAGTGGGTGGCAGTGATATGGTATGATGGAAGTAATA |
| | | | | AATACTATGCAGACTCCGTGAAGGGCCGATTCACCATCTCCAG |
| | | | | AGACATTTCCAAGAACACGCTGTATCTGCAAATGAACAGCCTG |
| | | | | AGAGTCGAGGACACGGCTGTGTATTACTGTGCGAGAGACGGGT |
| | | | | GGGAGCTGTCCTTTGACTACTGGGGCCAGGGAACCCTGGTCAC |
| | | | | CGTCTCCTCA |
| 350 | 16E2 | artificial | aa | QVQLVESGGGVVQPGRSLRLSCAASGFIFSSYGMHWVRQTPGK |
| | 17E10 | | | GLEWVAVIWYDGSNKYYADSVKGRFTISRDISKNTLYLQMNSL |
| | 20B12 | | | RVEDTAVYYCARDGWELSFDYWGQGTLVTVSS |
| 351 | 1D10 | artificial | nt | CAGGTGCAGCTGGTGGAGTCTGGGGGAGGCGTGGTCCAGCCTG |
| | 2C12 | | | GGAGGTCCCTGAGACTCTCCTGTGCAGCGTCTGGATTCACCTT |
| | | | | CAGTAGCTATGGCATGCACTGGGTCCGCCAGGCTCCAGGCAAG |
| | | | | GGGCTGGAGTGGGTGTCAGTTATATGGTATGATGGAAGTAATA |
| | | | | AATACTATGCAGACTCCGTGAAGGGCCGATTCACCATCTCCAG |
| | | | | AGACAATTCCAAGAACACGCTGTATCTGCAAATGAATAGCCTG |
| | | | | AGAGCTGAGGACACGGCTGTGTATTACTGCGCGAGAAGGGCCG |
| | | | | GTATAATAGGAACTACAGGCTACTACTACGGTATGGACGTCTG |
| | | | | GGGCCAAGGGACCACGGTCACCGTCTCCTCA |
| 352 | 1D10 | artificial | aa | QVQLVESGGGVVQPGRSLRLSCAASGFTFSSYGMHWVRQAPGK |
| | 2C12 | | | GLEWVSVIWYDGSNKYYADSVKGRFTISRDNSKNTLYLQMNSL |
| | | | | RAEDTAVYYCARRAGIIGTTGYYYGMDVWGQGTTVTVSS |
| 353 | 16C1 | artificial | nt | CAGGTGCAGCTGCAGGAGTCGGGCCCAGGACTGGTGAAGCCTT |
| | | | | CGGAGACCCTGTCCCTCACTTGTACTGTCTCTGGTGGCTCCAT |
| | | | | CAGTGGTTACTACTGGAGCTGGATCCGGCAGCCCCCAGGGAAG |
| | | | | GGACTGGAGTGGATTGGGTATATCTATTACATTGGGAGCACCA |
| | | | | ACTACAACCCCTCCCTCAAGAGTCGAGTCACCATGTCAATAGA |
| | | | | CACGTCCAAGAACCAGTTCTCCCTGACGCTGAGCTCTTTGACC |
| | | | | GCTGCGGACACGGCCGTGTATTTCTGTGCGAGAGATGGGAGCA |
| | | | | GTGGCTGGTACCGGTGGTTCGACCCCTGGGGCCAGGGAACCCT |
| | | | | GGTCACCGTCTCCTCA |
| 354 | 16C1 | artificial | aa | QVQLQESGPGLVKPSETLSLTCTVSGGSISGYYWSWIRQPPGK |
| | | | | GLEWIGYIYYIGSTNYNPSLKSRVTMSIDTSKNQFSLTLSSLT |
| | | | | AADTAVYFCARDGSSGWYRWFDPWGQGTLVTVSS |
| 355 | 25G10 | artificial | nt | CAGGTGCAGCTGCAGGAGTCGGGCCCAGGACTGGTGAAGCCTT |
| | | | | CGGAGACCCTGTCCCTCACCTGCACTGTCTCTGGTGGCTCCAT |
| | | | | CAGTGGTTACTACTGGAGCTGGATCCGGCAGCCCCCAGGGAAG |
| | | | | GGACTGGAGTGGATTGGGTATATCTATTACATTGGGAGCACCA |
| | | | | ACTACAACCCCTCCCTCAAGAGTCGAGTCACCATGTCAGTAGA |
| | | | | CACGTCCAAGAACCAGTTCTCCCTGAAGCTGAGCTCTGTGACC |
| | | | | GCTGCGGACACGGCCGTGTATTACTGTGCGAGAGATGGGAGCA |
| | | | | GTGGCTGGTACCGGTGGTTCGACCCCTGGGGCCAGGGAACCCT |
| | | | | GGTCACCGTCTCCTCA |
| 356 | 25G10 | artificial | aa | QVQLQESGPGLVKPSETLSLTCTVSGGSISGYYWSWIRQPPGK |
| | | | | GLEWIGYIYYIGSTNYNPSLKSRVTMSVDTSKNQFSLKLSSVT |
| | | | | AADTAVYYCARDGSSGWYRWFDPWGQGTLVTVSS |
| 357 | 16A4 | artificial | nt | CAGGTGCAGCTGCAGGAGTCgGGCCCAGGACTGGCGAAgcctt |
| | | | | cGGAGACcctgtccctcacctgCACTGTCTCTGGTGACTCCAT |
| | | | | CACTAGTTACTACTGGAGCTGGATCCGGCAGCCCCCAGGGAAG |
| | | | | GGACTGGAGTGGATTGGGTATATCTATTACAGTGGGAGCACCA |
| | | | | ATTACAACCCCTCCCTCAAGAGTCGAGTCACCATATCAGTAGA |
| | | | | CACGTCCAAGAACCAGTTCTCCCTGAAGCTGAGTTCTGTGACC |
| | | | | GCTGCGGACACGGCCGTGTATTACTGTGCGAGAGATCAAAGGC |
| | | | | GGATAGCAGCAGCTGGTACCCACTTCTACGGTATGGACGTCTG |
| | | | | GGGCCAAGGGACCACGGTCACCGTCTCCTCA |
| 358 | 16A4 | artificial | aa | QVQLQESGPGLAKPSETLSLTCTVSGDSITSYYWSWIRQPPGK |
| | | | | GLEWIGYIYYSGSTNYNPSLKSRVTISVDTSKNQFSLKLSSVT |
| | | | | AADTAVYYCARDQRRIAAAGTHFYGMDVWGQGTTVTVSS |
| 359 | 1F10 | artificial | nt | CAGGTGCAGCTGCAGGAGTCGGGCCCAGGACTGGTGAAGCCTT |
| | | | | CACAGACCCTGTCCCTCACCTGCACTGTCTCTGGTGGCTCCAT |
| | | | | CAGCAGTGGTGGTTACTACTGGAGCTGGATCCGCCAGCACCCA |
| | | | | GGGAAGGGCCTGGAGTGGATTGGGTACATCTATTACAGTGGGA |
| | | | | GCACCTACTACAACCCGTCCCTCACGAGTCGAGTTACCATATC |
| | | | | AGTAGACACGTCTAAGAACCAGTTCTCCCTGAAGCTGAGCTCT |
| | | | | GTGACTGCCGCGGACACGGCCGTGTATTACTGTGCGAGAGATG |
| | | | | GAAGCAGTGGCTGGTACTTCCAGCACTGGGGCCAGGGCACCCT |
| | | | | GGTCACCGTCTCCTCA |
| 360 | 1F10 | artificial | aa | QVQLQESGPGLVKPSQTLSLTCTVSGGSISSGGYYWSWIRQHP |
| | | | | GKGLEWIGYIYYSGSTYYNPSLTSRVTISVDTSKNQFSLKLSS |
| | | | | VTAADTAVYYCARDGSSGWYFQHWGQGTLVTVSS |
| 361 | 4A9 | artificial | nt | CAGGTGCAGCTGCAGGAGTCGGGCCCAGGACTGGTGAAGCCTT |
| | | | | CGGAGACCCTGTCCCTCACCTGCACTGTCTCTGGTGGCTCCAT |
| | | | | CAGTGGTTACTACTGGAGCTGGATCCGGCAGCCCCCAGGAAAG |
| | | | | GGACTGGAGTGGTTTGCATATTTCTCTTACAGTGGGAGCACCA |
| | | | | ACTACAACCCCTCCCTCAAGAGTCGAGTCACCTTATCAGTAGA |
| | | | | CACGTCCAAGAACCAGTTCTCCCTGAAGCTGAGCTCTGTGACC |
| | | | | GCTGCGGACACGGCCGTGTATTACTGTGCGAGGAACTGGGCCT |
| | | | | TCCACTTTGACTTCTGGGGCCAGGGAACCCTGGTCACCGTCTC |
| | | | | CTCA |
| 362 | 4A9 | artificial | aa | QVQLQESGPGLVKPSETLSLTCTVSGGSISGYYWSWIRQPPGK |
| | | | | GLEWFAYFSYSGSTNYNPSLKSRVTLSVDTSKNQFSLKLSSVT |
| | | | | AADTAVYYCARNWAFHFDFWGQGTLVTVSS |
| 363 | 4F7 | artificial | nt | CAGGTGCAGCTGCAGGAGTCGGGCCCAGGACTGGTGAAGCCTT |
| | | | | CGGAGACCCTGTCCCTCACCTGCACTGTCTCTGGTGGCTCCAT |
| | | | | CAGTAGTTACTCCTGGAGCTGGATCCGGCAGCCCCCAGGGAAG |
| | | | | GGACTGGAGTGGATTGGGTATATCTATTACAGTGGGAGCACCA |
| | | | | ACTACAACCCCTCCCTCAAGAGTCGAGTCACCATATCATTAGA |
| | | | | CACGTCCAAGAACCAGTTCTCCCTGAAGCTGAGCTCTGTGACC |
| | | | | GCTGCGGACACGGCCGTGTATTACTGTGCGAGGAACTGGGCCT |
| | | | | TCCACTTTGACTACTGGGGCCAGGGAACCCTGGTCACCGTCTC |
| | | | | CTCA |
| 364 | 4F7 | artificial | aa | QVQLQESGPGLVKPSETLSLTCTVSGGSISSYSWSWIRQPPGK |
| | | | | GLEWIGYIYYSGSTNYNPSLKSRVTISLDTSKNQFSLKLSSVT |
| | | | | AADTAVYYCARNWAFHFDYWGQGTLVTVSS |
| 365 | 22D1 | artificial | nt | CAGGTGCAGCTGGTGCAGTCTGGGGCTGAGGTGAAGAAGCCTG |
| | | | | GGGCCTCAGTGAGGGTTTCCTGCAAGGTTTCTGGATACACCTT |
| | | | | CACCAGCTACTTTATTCACTGGGTACGCCAGGCCCCTGGACAA |
| | | | | GGGCTTGAGTGGATGGGAATAATCAACCCTATTAGTGTTAGCA |
| | | | | CAAGCTACGCACAGAAGTTCCAGGGCAGAGTCACCATGACCAG |
| | | | | GGACACGTCCACGAGCACAGTCTTCATGGAGCTGAGCAGCCTG |
| | | | | AGATCTGAGGACACGGCCGTGTATTACTGTGCGCGAGGGGGGA |
| | | | | TACAGCTATGGTTACATTTGGACTACTGGGGCCAGGGAACCCT |
| | | | | GGTCACCGTCTCCTCA |
| 366 | 22D1 | artificial | aa | QVQLVQSGAEVKKPGASVRVSCKVSGYTFTSYFIHWVRQAPGQ |
| | | | | GLEWMGIINPISVSTSYAQKFQGRVTMTRDTSTSTVFMELSSL |
| | | | | RSEDTAVYYCARGGIQLWLHLDYWGQGTLVTVSS |
| 367 | 19B5 | artificial | nt | CAGGTGCAGTTGGTGCAGTCTGGGGCTGAGGTGAAGAAGCCTG |
| | | | | GGGCCTCAGTGAAGGTTTCCTGCAAGGTTTCTGGATACACCTT |
| | | | | CACCAGCTACTTTATTCACTGGGTGCGCCAGGCCCCTGGACAA |
| | | | | GGGCTTGAATGGATGGGAATTATCAACCCTATTAGTGTTAGCA |
| | | | | CAAGCTACGCACAGAAGTTCCAGGGCAGAGTCACCATGACCAG |
| | | | | GGACACGTCCACGAGCACAGTCTTCATGGAGCTGAGCAGcCTG |
| | | | | AGATCTGAGGACACGGCCGTGTATTACTGTGCGCGAGGGGGGA |
| | | | | TACAGCTATGGTTACATTTGGACTACTGGGGCCAGGGAACCCT |
| | | | | GGTCACCGTCTCCTCA |
| 368 | 19B5 | artificial | aa | QVQLVQSGAEVKKPGASVKVSCKVSGYTFTSYFIHWVRQAPGQ |
| | | | | GLEWMGIINPISVSTSYAQKFQGRVTMTRDTSTSTVFMELSSL |
| | | | | RSEDTAVYYCARGGIQLWLHLDYWGQGTLVTVSS |
| 369 | 25F8 | artificial | nt | CAGGTGCAGCTGGTGCAGTCTGGGGCTGAGGTGAAGAAGCCTG |
| | | | | GGGCCTCAGTGAAGGTTTCCTGCAAGGCATCTGGATACACCTT |
| | | | | CACCAGCTACTATATTCACTGGGTGCGCCAGGCCCCTGGACAA |
| | | | | GGACTTGAGTGGATGGGAATAATCAACCCCAGTGGTGGTAGCA |
| | | | | CAAGGTACGCACAGAAGTTCCAGGGCAGAGTCACCATGACCAG |
| | | | | GGACACGTCCACGAGCACAGTCTTCATGGAGCTGAGCagcctG |
| | | | | AGATCTGAGGACACGGCCGTGTATTACTGTGCGCGAGGGGGAA |
| | | | | TACAGCTATGGTTACATTttGACTACTGGGGCCAGGGAACCCT |
| | | | | GGTCACCGTCTCCTCA |
| 370 | 25F8 | artificial | aa | QVQLVQSGAEVKKPGASVKVSCKASGYTFTSYYIHWVRQAPGQ |
| | | | | GLEWMGIINPSGGSTRYAQKFQGRVTMTRDTSTSTVFMELSSL |
| | | | | RSEDTAVYYCARGGIQLWLHFDYWGQGTLVTVSS |
| 371 | 26D1 | artificial | nt | CAGGTGCAGTTGGTGCAGTCTGGGGCTGAGGTGAAGAAGCCTG |
| | | | | GGGCCTCAGTGAAGGTTTCCTGTAAGGCATCTAGATACACCTT |
| | | | | CACCAGCTACTATATGTCCTGGGTGCGACAGGCCCCTGGACAA |
| | | | | GGGCTTGAGTGGATGGGAATAATCCACCCTAGTGGTGGTGACA |
| | | | | CAACCTACGCACAGAAGTTCCAGGGCAGAGTCACCATGACCGG |
| | | | | GGACACGTCCACGAGCACAGTCTACATGGAGCTGAGCAGCCTG |
| | | | | AGATCTGAGGACACGGCCGTGTATTACTGTGCGAGAGGGGGGA |
| | | | | TAAAACTATGGTTACATTTTGACTATTGGGGCCAGGGAACCCT |
| | | | | GGTCACCGTCTCCTCA |
| 372 | 26D1 | artificial | aa | QVQLVQSGAEVKKPGASVKVSCKASRYTFTSYYMSWVRQAPGQ |
| | | | | GLEWMGIIHPSGGDTTYAQKFQGRVTMTGDTSTSTVYMELSSL |
| | | | | RSEDTAVYYCARGGIKLWLHFDYWGQGTLVTVSS |
| 373 | 4D2 | artificial | nt | CAGGTGCAGCTGGTGGAGTCTGGGGGAGGCGTGGTCCAGCCTG |
| | | | | GGAGGTCCCTGAGACTCTCCTGTGCAGCCTCTGGATTCACCTT |
| | | | | CAGTAGTTATGACATGCACTGGGTCCGCCAGGCTCCAGGCAAG |
| | | | | GGGCTGGAGTGGGTGGCAGTTATATCATATGATGGAACTAATG |
| | | | | AATACTATGCAGACTCCGTGAAGGGCCGATTCACCATCTCCAG |
| | | | | AGACACTTCCAAGAACACGCTGTATTTGCAAATGAACAGCCTG |
| | | | | AGAGCTGAGGACACGGCTGTATATTACTGTGCGAGAGAACGAT |
| | | | | ATTTTGACTGGTCTTTTGACTACTGGGGCCAGGGAACCCTGGT |
| | | | | CAGTGTCTCCTCA |
| 374 | 4D2 | artificial | aa | QVQLVESGGGVVQPGRSLRLSCAASGFTFSSYDMHWVRQAPGK |
| | | | | GLEWVAVISYDGTNEYYADSVKGRFTISRDTSKNTLYLQMNSL |
| | | | | RAEDTAVYYCARERYFDWSFDYWGQGTLVSVSS |
| 375 | 4E10 | artificial | nt | CAGGTGCAGCTGGTGGAGTCTGGGGGAGGCGTGGTCCAGCCTG |
| | | | | GGAGGTCCCTGAGACTCTCCTGTGCAGCGTCTGGATTCACCTT |
| | | | | CAGTAGCTATGACATGCACTGGGTCCGCCAGGCTCCAGGCAAG |
| | | | | GGGCTGGAGTGGGTGGCAGTTATATGGTATGATGGAAGTAATA |
| | | | | AATACTATGCAGACTCCGTGAAGGGCCGATTCACCATCTCCAG |
| | | | | AGACAATTCCACGAACACGCTGCATCTGCAAATGAACAGCCCG |
| | | | | AGAGCCGAGGACACGGCTGTGTACTACTGTGCGAGAGAGTATA |
| | | | | GGTACAGCTGGTACTTTGACTACTGGGGCCAGGGAACCCTGGT |
| | | | | CACCGTCTCCTCA |
| 376 | 4E10 | artificial | aa | QVQLVESGGGVVQPGRSLRLSCAASGFTFSSYDMHWVRQAPGK |
| | | | | GLEWVAVIWYDGSNKYYADSVKGRFTISRDNSTNTLHLQMNSP |
| | | | | RAEDTAVYYCAREYRYSWYFDYWGQGTLVTVSS |
| 377 | 22G10 | artificial | nt | GAGGTGCAACTGTTGGAGTCTGGGGGAGGCTTGGTACAGCCTG |
| | | | | GGGGGTCCCTGAGACTCTCCTGTGCAGCCTCTGGATTCACCTT |
| | | | | TAGCAGTTATGCCATGAACTGGGTCCGCCAGGCTCCAGGGAAG |
| | | | | GGGCTGGAGTGGGTCTCAACTATTAGTGGTGGTGGTGCTAACA |
| | | | | CATACTACGCAGACTCCGTGAAGGGCCGGTTCACCATCTCCAG |
| | | | | TGACAATTCCAAGAGCACGCTGTATCTGCAAATGAACAGCCTG |
| | | | | AGAGCCGCGGACACGGCCGTATATCACTGTGCGAAAGGGGGAA |
| | | | | TGGGGGGATACTACTACGGTATGGACGTCTGGGGCCAAGGGAC |
| | | | | CACGGTCACCGTCTCCTCA |
| 378 | 22G10 | artificial | aa | EVQLLESGGGLVQPGGSLRLSCAASGFTFSSYAMNWVRQAPGK |
| | | | | GLEWVSTISGGGANTYYADSVKGRFTISSDNSKSTLYLQMNSL |
| | | | | RAADTAVYHCAKGGMGGYYYGMDVWGQGTTVTVSS |
| 379 | 2C12_LC#1 | artificial | nt | CAGGTGCAGCTGGTGGAGTCTGGGGGAGGCGTGGTCCAGCCTG |
| | | | | GGAGGTCCCTGAGACTCTCCTGTGCAGCGTCTGGATTCACCTT |
| | | | | CAGTAGCTATGGCATGCACTGGGTCCGCCAGGCTCCAGGCAAG |
| | | | | GGGCTGGAGTGGGTGTCAGTTATATGGTATGATGGAAGTAATA |
| | | | | AATACTATGCAGACTCCGTGAAGGGCCGATTCACCATCTCCAG |
| | | | | AGACAATTCCAAGAACACGCTGTATCTGCAAATGAATAGCCTG |
| | | | | AGAGCTGAGGACACGGCTGTGTATTACTGCGCGAGAAGGGCCG |
| | | | | GTATAATAGGAACTACAGGCTACTACTACGGTATGGACGTCTG |
| | | | | GGGCCAAGGGACCACGGTCACCGTCTCCTCA |
| 380 | 2C12_LC#1 | artificial | aa | QVQLVESGGGVVQPGRSLRLSCAASGFTFSSYGMHWVRQAPGK |
| | | | | GLEWVSVIWYDGSNKYYADSVKGRFTISRDNSKNTLYLQMNSL |
| | | | | RAEDTAVYYCARRAGIIGTTGYYYGMDVWGQGTTVTVSS |
| 381 | 2H12_LC#2 | artificial | nt | CAGGTGCAGCTGGTGGAGTCTGGGGGAGGCGTGGTCCAGCCTG |
| | | | | GGAGGTCCCTGAGACTCTCCTGTGCAGCGTCTGGATTCACCTT |
| | | | | CAGTAGCTATGGCATGCACTGGGTCCGCCAGGCTCCAGGCAAG |
| | | | | GGGCTGGAGTGGGTGGCAGTTATATGGTATGATGGAAGTAATA |
| | | | | AATACTATACAGACTCCGTGAAGGGCCGATTCACCATCTCCAG |
| | | | | AGACAATTCCAAGAACACGCTGTATCTGCAAATGAATAGCCTG |
| | | | | AGAGCTGAGGACACGGCTGTGTATTACTGTGCGAGAAGGGCCG |
| | | | | GTATAATAGGAACTACAGGCTACTACTACGGTATGGACGTCTG |
| | | | | GGGCCAAGGGACCACGGTCACCGTCTCCTCA |
| 382 | 2H12_LC#2 | artificial | aa | QVQLVESGGGVVQPGRSLRLSCAASGFTFSSYGMHWVRQAPGK |
| | | | | GLEWVAVIWYDGSNKYYTDSVKGRFTISRDNSKNTLYLQMNSL |
| | | | | RAEDTAVYYCARRAGIIGTTGYYYGMDVWGQGTTVTVSS |
| 383 | 2G6_LC#1 | artificial | nt | CAGGTGCAGTTGGTGGAGTCTGGGGGAGGCGTGGTCCAGCCTG |
| | | | | GGAGGTCCCTGAGACTCTCCTGTGCAGCGTCTGGATTCACCTT |
| | | | | CAGTAGCTATGGCATGCACTGGGTCCGCCAGGCTCCAGGCAAG |
| | | | | GGGCTGGAGTGGGTGGCATTTATATGGTATGATGGAAGTAATA |
| | | | | AATACTATGCAGACTCCGTGAAGGACCGATTCACCATCTCCAG |
| | | | | AGACAATTCCAAGAACACGCTGTATCTGCAAATGAAAAGCCTG |
| | | | | AGAGCTGAGGACACGGCTGTGTATTACTGTGCGAGAAGGGCCG |
| | | | | GTATAATAGGAACTATAGGCTACTACTACGGTATGGACGTCTG |
| | | | | GGGCCAAGGGACCACGGTCACCGTCTCCTCA |
| 384 | 2G6_LC#1 | artificial | aa | QVQLVESGGGVVQPGRSLRLSCAASGFTFSSYGMHWVRQAPGK |
| | | | | GLEWVAFIWYDGSNKYYADSVKDRFTISRDNSKNTLYLQMKSL |
| | | | | RAEDTAVYYCARRAGIIGTIGYYYGMDVWGQGTTVTVSS |
| 385 | 2H12 | artificial | nt | CAGGTGCAGCTGGTGGAGTCTGGGGGAGGCGTGGTCCAGCCTG |
| | | | | GGAGGTCCCTGAGACTCTCCTGTGCAGCGTCTGGATTCACCTT |
| | | | | CAGTAGCTATGGCATGCACTGGGTCCGCCAGGCTCCAGGCAAG |
| | | | | GGGCTGGAGTGGGTGGCAGTTATATGGTATGATGGAAGTAATA |
| | | | | AATACTATACAGACTCCGTGAAGGGCCGATTCACCATCTCCAG |
| | | | | AGACAATTCCAAGAACACGCTGTATCTGCAAATGAATAGCCTG |
| | | | | AGAGCTGAGGACACGGCTGTGTATTACTGTGCGAGAAGGGCCG |
| | | | | GTATAATAGGAACTACAGGCTACTACTACGGTATGGACGTCTG |
| | | | | GGGCCAAGGGACCACGGTCACCGTCTCCTCA |
| 386 | 2H12 | artificial | aa | QVQLVESGGGVVQPGRSLRLSCAASGFTFSSYGMHWVRQAPGK |
| | | | | GLEWVAVIWYDGSNKYYTDSVKGRFTISRDNSKNTLYLQMNSL |
| | | | | RAEDTAVYYCARRAGIIGTTGYYYGMDVWGQGTTVTVSS |
| 387 | 2G6 | artificial | nt | CAGGTGCAGTTGGTGGAGTCTGGGGGAGGCGTGGTCCAGCCTG |
| | | | | GGAGGTCCCTGAGACTCTCCTGTGCAGCGTCTGGATTCACCTT |
| | | | | CAGTAGCTATGGCATGCACTGGGTCCGCCAGGCTCCAGGCAAG |
| | | | | GGGCTGGAGTGGGTGGCATTTATATGGTATGATGGAAGTAATA |
| | | | | AATACTATGCAGACTCCGTGAAGGACCGATTCACCATCTCCAG |
| | | | | AGACAATTCCAAGAACACGCTGTATCTGCAAATGAAAAGCCTG |
| | | | | AGAGCTGAGGACACGGCTGTGTATTACTGTGCGAGAAGGGCCG |
| | | | | GTATAATAGGAACTATAGGCTACTACTACGGTATGGACGTCTG |
| | | | | GGGCCAAGGGACCACGGTCACCGTCTCCTCA |
| 388 | 2G6 | artificial | aa | QVQLVESGGGVVQPGRSLRLSCAASGFTFSSYGMHWVRQAPGK |
| | | | | GLEWVAFIWYDGSNKYYADSVKDRFTISRDNSKNTLYLQMKSL |
| | | | | RAEDTAVYYCARRAGIIGTIGYYYGMDVWGQGTTVTVSS |
| 389 | 23A10 | artificial | nt | CAGGTGCAGCTGGTGGAGTCTGGGGGAGGCGTGGTCCAGCCTG |
| | | | | GGAGGTCCCTGAGACTCTCCTGTGCAGCGTCTGGATTCACCTT |
| | | | | CAGTCGCTATGGCATACACTGGGTCCGCCAGGCTCCAGGCAAG |
| | | | | GGGCTGGAGTGGGTGGCAGTTATATGGTATGATGGAAGTAATA |
| | | | | AATACTATGCAGACTCCGTGAAGGGCCGATTCACCATCTCCAG |
| | | | | AGACAATTCCAAGAACACGCTGTATCTGCTAATGAACAGCCTG |
| | | | | AGAGCCGAGGACTCGGCTGTGTATTACTGTGCGAGAAGGGCCG |
| | | | | GTATACCTGGAACTACGGGCTACTACTATGGTATGGACGTCTG |
| | | | | GGGCCAAGGGACCACGGTCACCGTCTCCTCA |
| 390 | 23A10 | artificial | aa | QVQLVESGGGVVQPGRSLRLSCAASGFTFSRYGIHWVRQAPGK |
| | | | | GLEWVAVIWYDGSNKYYADSVKGRFTISRDNSKNTLYLLMNSL |
| | | | | RAEDSAVYYCARRAGIPGTTGYYYGMDVWGQGTTVTVSS |
| 391 | 5E3 | artificial | nt | GAGGTGCAGTTGGTGGAGTCTGGGGGAGGCCTGGTCAAGCCTG |
| | | | | GGGGGTCCCTGAGACTCTCCTGTGCAGCCTCTGGATTCACCTT |
| | | | | CAGTAGCTATAGCATGCACTGGGTCCGCCAGGCTCCAGGGAAG |
| | | | | GGGCTGGAGTGGGTCTCATCCATTAGTAGTAGTAGTAGTTACA |
| | | | | TATACTACGCAGACTCAGTGAAGGGCCGATTCACCATCTCCAG |
| | | | | AGACAACGCCAAGAACTCACTGTATCTGCAAATGAACAGCCTG |
| | | | | AGAGCCGAGGACACGGCTGTGTATTACTGTGCGAGAGGGGAAA |
| | | | | CTGGAACTAACTACTACTACTACGGTATGGACGTCTGGGGCCA |
| | | | | AGGGACCACGGTCACCGTCTCCTCA |
| 392 | 5E3 | artificial | aa | EVQLVESGGGLVKPGGSLRLSCAASGFTFSSYSMHWVRQAPGK |
| | | | | GLEWVSSISSSSSYIYYADSVKGRFTISRDNAKNSLYLQMNSL |
| | | | | RAEDTAVYYCARGETGTNYYYYGMDVWGQGTTVTVSS |

TABLE IIB
Light Chain Variable Region Polynucleotide and Amino acid Sequences

| SEQ | | | | |
|---|---|---|---|---|
| ID | | | | |
| NO. | DESIGNATION | SOURCE | TYPE | SEQUENCE |
| 393 | 17H8 | artificial | nt | GACATTGTATTGACGCAGtctCCAGGCACCCTGTCTTTGTCTC |
| | 23B6 | | | CAGGGGAAAGAGCCACCCTCTCCTGCAGGGCCAGTCAGAGTGT |
| | 28D10 | | | TGCCGGCAGCTACCTAGCCTGGTACCAGCAGAAACCTGGCCAG |
| | | | | GCTCCCAGGCTCCTCATCTCTGGTGCATCCAGCAGGGCCACTG |
| | | | | GCATCCCAGACAGGTTCAGTGGCAGTGGGTCTGGGACAGACTT |
| | | | | CACTCTCACCATCAGCAGACTGGAGCCTGAAGATTTTGCAGTG |
| | | | | TATTACTGTCAGCAGTATGGTAAATCACCGATCACCTTCGGCC |
| | | | | AAGGGACACGACTGGAGATGAAAGGA |
| 394 | 17H8 | artificial | aa | DIVLTQSPGTLSLSPGERATLSCRASQSVAGSYLAWYQQKPGQ |
| | 23B6 | | | APRLLISGASSRATGIPDRFSGSGSGTDFTLTISRLEPEDFAV |
| | 28D10 | | | YYCQQYGKSPITFGQGTRLEMKG |
| 395 | 4A2 | artificial | nt | GAAATTGTGTTGACGCAGTCTCCAGGCACCCTGTCTTTGTCTC |
| | 5B4 | | | CAGGGGAAAGAGCCACCCTCTCTTGCAGGGCCAGTCGGAATAT |
| | 5C5 | | | TAGCAGCAGCTACTTAGCCTGGTACCAGCAGAAACCTGGCCAG |
| | | | | GCTCCCAGGCTCCTCATCTATGGTCCATCCAGCAGGGCCACTG |
| | | | | GCATCCCAGACAGGTTCAGTGGCAGTGGGTCTGGGACAGACTT |
| | | | | CACTCTCACCATCAGCAGACTGGAGCCTGAAGATTTTACAGTG |
| | | | | TATTACTGTCAGCAGTATGGTAGCTCATTCACTTTCGGCCCTG |
| | | | | GGACCAAAGTGGATATCAAACGA |
| 396 | 4A2 | artificial | aa | EIVLTQSPGTLSLSPGERATLSCRASRNISSSYLAWYQQKPGQ |
| | 5B4 | | | APRLLIYGPSSRATGIPDRFSGSGSGTDFTLTISRLEPEDFTV |
| | 5C5 | | | YYCQQYGSSFTFGPGTKVDIKR |
| 397 | 16H2 | artificial | nt | CAGTCTGCGCTGACTCAGCCACCCTCAGCGACTGGGACCCCCG |
| | 20D3 | | | GGCAGAGGGTCACCATCTCTTGTTCTGGAAGCAGCTCCAACAT |
| | 23E7 | | | CGGAAGTAATTTTGTAAACTGGTACAAACAACTCCCAGGAACG |
| | | | | GCCCCCAAAGTCCTCATCTATACTAATAATCAGCGGCCCTCAG |
| | | | | GGGTCCCTGACCGATTCTCTGGCTCCAAGTCTGGCACCTCAGC |
| | | | | CTCCCTGGCCATCAGTGGGCTCCAGTCTGAGGATGAGTCTGAT |
| | | | | TATTACTGTGCAACATGGGATGACAGCCTGAATGGTTGGGTGT |
| | | | | TCGGCGGAGGGACCAAGCTGACCGTCCTAGGT |
| 398 | 16H2 | artificial | aa | QSALTQPPSATGTPGQRVTISCSGSSSNIGSNFVNWYKQLPGT |
| | 20D3 | | | APKVLIYTNNQRPSGVPDRFSGSKSGTSASLAISGLQSEDESD |
| | 23E7 | | | YYCATWDDSLNGWVFGGGTKLTVLG |
| 399 | 26F12 | artificial | nt | CAGTCTGTGCTGACTCAGTCACCCTCAGCGTCTGGGACCCCCG |
| | 27B3 | | | GGCAGAAGGTCACCATCTCTTGTTCTGGAAGCCGCTCCAACAT |
| | | | | CGGAAGTAATTTTGTAAACTGGTACCAGCAGCTCCCAGGAACG |
| | | | | GCCCCCAAACTCCTCATCTATACTAATTATCAGCGGCCCTCAG |
| | | | | GGGTCCCTGACCGATTCTCTGGCTCCAAGTCTGGCACCTCAGC |
| | | | | CTCCCTGGCCATCAGTGGGCTCCAGTCTGAGGATGAGGCTGAT |
| | | | | TATTACTGTGCAGTATGGGATGACAGCCTGAATGGTTGGGTGT |
| | | | | TCGGCGGAGGGACCAAGCTGACCGTCCTAGGT |
| 400 | 26F12 | artificial | aa | QSVLTQSPSASGTPGQKVTISCSGSRSNIGSNFVNWYQQLPGT |
| | 27B3 | | | APKLLIYTNYQRPSGVPDRFSGSKSGTSASLAISGLQSEDEAD |
| | | | | YYCATWDDSLNGWVFGGGTKLTVLG |
| 401 | 4B10 | artificial | nt | GAAATTGTATTGACGCAGTCTCCAGGCACCCTGTCTTTGTCTC |
| | 4C2 | | | CAGGGGAAAGAGCCACCCTCTCCTGCAGGGCCAGTCAGAGTGT |
| | | | | TAGCAACACCTACTTAGCCTGGTACCATCAGAGACCTGGCCAG |
| | | | | GCTCCCAGGCTCCTCATCTATGGTGCATCCAGCAGGGCCACTG |
| | | | | GCATCCCAGACAGATTCAGTGGCAGTGGGTCTGGGACAGACTT |
| | | | | CGCTCTCACCATCAGCAGTCTGGAGCCTGAAGATTTTGCAGTG |
| | | | | TATTACTGTCAGCAGTACAGTAACTCgtgGACGTTCGGCCAAG |
| | | | | GGACCAAGGTGGAAATCAaacGA |
| 402 | 4B10 | artificial | aa | EIVLTQSPGTLSLSPGERATLSCRASQSVSNTYLAWYHQRPGQ |
| | 4C2 | | | APRLLIYGASSRATGIPDRFSGSGSGTDFALTISSLEPEDFAV |
| | | | | YYCQQYSNSWTFGQGTKVEIKR |
| 403 | 4D3 | artificial | nt | GAAATTGTGTTGACGCAGTCTCCAGGCACCCTGTCTTTGTCTC |
| | 4F3 | | | CAGGGGAAAGAGCCACCCTCTCCTGCAGGGCCAGTCAGAGTGT |
| | | | | TAGCAGCAGCTACTTAGCCTGGTACCAGCAGAAACCTGGCCAG |
| | | | | GCTCCCAGGCTCCTCATCTATGGTGCATCCAGCAGGGCCACTG |
| | | | | GCATCCCAGACAGGTTCAGTGGCAGTGGGTCTGGGACAGACTT |
| | | | | CACTCTCACCATCAGCAGACTGGAACCTGAGGATTTTGCAGTG |
| | | | | TATTACTGTCAGCAGTATGGTAGCTCGTGGACGTTCGGCCAAG |
| | | | | GGACCAAGGTGGAAATCAAACGA |
| 404 | 4D3 | artificial | aa | EIVLTQSPGTLSLSPGERATLSCRASQSVSSSYLAWYQQKPGQ |
| | 4F3 | | | APRLLIYGASSRATGIPDRFSGSGSGTDFTLTISRLEPEDFAV |
| | | | | YYCQQYGSSWTFGQGTKVEIKR |
| 405 | 16E2 | artificial | nt | GACATCCAGATGACCCAGTCTCCATCCTCACTGTCTGCATCTG |
| | 17E10 | | | TAGGAGACAGAGTCACCATCACTTGTCGGGCGAGTCAGGGCAT |
| | 20B12 | | | TAGCAATTATTTAGCCTGGTTACAGCAGAAACCAGGGAAAGCC |
| | | | | CCTAAGTCCCTGATCTATGCTGCATCCAGTTTGCAAAGTGGGG |
| | | | | TCCCATCAAAGTTCAGCGGCAGTGGATCTGGGACAGATTTCAC |
| | | | | TCTCACCATCAGCAGCCTGCAGCCTGAAGATTTTGCAACTTAT |
| | | | | TACTGCCAACACTATTTTACTTACCCTCGGACGTTCGGCCAAG |
| | | | | GGACCAAGGTGGAAATCAAACGA |
| 406 | 16E2 | artificial | aa | DIQMTQSPSSLSASVGDRVTITCRASQGISNYLAWLQQKPGKA |
| | 17E10 | | | PKSLIYAASSLQSGVPSKFSGSGSGTDFTLTISSLQPEDFATY |
| | 20B12 | | | YCQHYFTYPRTFGQGTKVEIKR |
| 407 | 1D10 | artificial | nt | TCCTATGCGCTGACTCAGCCACCCTCAGTGTCCGTGTCCCCAG |
| | 2C12 | | | GACAGACAGCCAGCCTCACCTGCTCTGGAGATAGATTGGGGGA |
| | | | | AAAATATACTTGCTGGTATCAGCAGAGGCCAGGCCAGTCCCCT |
| | | | | TTGCTGGTCATCTATCAAGATACCAAGCGGCCCTCAGGGATCC |
| | | | | CTGAGCGATTCTCTGGCTCCACCTCTGGTAACACAGCCACTCT |
| | | | | GACCATCAGCGGGACCCAGGCTATGGATGAGGCTGACTATTAC |
| | | | | TGTCAGGCGTGGGACAGCAGCACTGTGGTATTCGGCGGAGGGA |
| | | | | CCAAGCTGACCGTCCTAGGT |
| 408 | 1D10 | artificial | aa | SYALTQPPSVSVSPGQTASLTCSGDRLGEKYTCWYQQRPGQSP |
| | 2C12 | | | LLVIYQDTKRPSGIPERFSGSTSGNTATLTISGTQAMDEADYY |
| | | | | CQAWDSSTVVFGGGTKLTVLG |
| 409 | 16C1 | artificial | nt | GAAATTGTGTTGACGCAGTCTCCAGGCACCCTGTCTTTGTCTC |
| | | | | CAGGGGAAAGAGCCACCCTCTCCTGCAGGGCCAGCCAGAGTGT |
| | | | | TAGCAGCAGCTACTTAGCCTGGTACCAGCAGAAACCTGGCCAG |
| | | | | GCTCCCAGGCTCCTCATCTTTGGTGCATCCAGCAGGGCCACTG |
| | | | | GCATCCCAGACAGGTTCAGTGGCAGTGGGTCTGGGACAGACTT |
| | | | | CACTCTCACCATCAGCGGACTGGAGCCTGAAGATTTTGCAGTG |
| | | | | TATCACTGTCAGCAGTATGGTAACTCACCGCTCACTTTCGGCG |
| | | | | GAGGGACCAAGGTGGAGATCAAACGA |
| 410 | 16C1 | artificial | aa | EIVLTQSPGTLSLSPGERATLSCRASQSVSSSYLAWYQQKPGQ |
| | | | | APRLLIFGASSRATGIPDRFSGSGSGTDFTLTISGLEPEDFAV |
| | | | | YHCQQYGNSPLTFGGGTKVEIKR |
| 411 | 25G10 | artificial | nt | GAAATTGTGTTGACGCAGTCTCCAGGCACCCTGTCTTTGTCTC |
| | | | | CAGGGGAAAGAGCCACCCTCTCCTGCAGGGCCAGTCAGAGTGT |
| | | | | TAGCAGCAGCTACTTAGCCTGGTACCAGCAGAAACCTGGCCAG |
| | | | | GCTCCCAGGCTCCTCATCTTTGGTGCATCCAGCAGGGCCACTG |
| | | | | GCATCCCAGACAGGTTCAGTGGCAGTGGGTCTGGGACAGactT |
| | | | | CACTCTCACCATCAGCAGACTGGAGCCTGAAGATTTTGCAGTG |
| | | | | TATCACTGTCAGCAGTATGGTAACTCACCGCTCACTTTCGGCG |
| | | | | GAGGGACCAAGGTGGAGATCAAACGA |
| 412 | 25G10 | artificial | aa | EIVLTQSPGTLSLSPGERATLSCRASQSVSSSYLAWYQQKPGQ |
| | | | | APRLLIFGASSRATGIPDRFSGSGSGTDFTLTISRLEPEDFAV |
| | | | | YHCQQYGNSPLTFGGGTKVEIKR |
| 413 | 16A4 | artificial | nt | GAAATTGTGTTGACGCAGTCTCCAGGCACCCTGTCTTTGTCTC |
| | | | | CAGGGGAAAGAGCCACCCtCTCCTGCAGGGCCAGTCAGAGTGT |
| | | | | TAGCAGCAGTTATTTAGCCTGGTACCAGCAGAAACCTGGCCAG |
| | | | | GCTCCCAGGCTCCTCATCTATGGTACATCCAGCAGGGCCACTG |
| | | | | GCATCCCAGACAGGTTCAGTGGCAGTGGGTCTGGGACAGACTT |
| | | | | CACTCTCACCATCAGCAGACTGGAGCCTGAAGATTTTGCAGTG |
| | | | | TATTATTGTCAGCAGTACGGTAGCTCACCTTTCACTTTCGGCG |
| | | | | GAGGGACCAAGGTGGAGATCAAACGA |
| 414 | 16A4 | artificial | aa | EIVLTQSPGTLSLSPGERATLSCRASQSVSSSYLAWYQQKPGQ |
| | | | | APRLLIYGTSSRATGIPDRFSGSGSGTDFTLTISRLEPEDFAV |
| | | | | YYCQQYGSSPFTFGGGTKVEIKR |
| 415 | 1F10 | artificial | nt | GAAATTGTGTTGACGCAGTCTCCAGGCACCCTGTCTTTGTCTC |
| | | | | CAGGGGAAAGAGCCACCCTCTCCTGCAGGGCCAGTCGGAGTAT |
| | | | | TAGCAGCAGCTACTTAGCCTGGTACCAGCAGAAACCTGGCCAG |
| | | | | GCTCCCAGGCTCCTCATCTATGGTCCATCCAGCAGGGCCACTG |
| | | | | GCATCCCAGACAGGTTCAGTGGCAGTGGGTCTGGGACAGACTT |
| | | | | CACTCTCACCATCAGCAGACTGGAGCCTGAAGATTTTGCAGTG |
| | | | | TATTACTGTCAGCAGTATGGTAGCTCATTCACTTTCGGCCCTG |
| | | | | GGACCAAAGTGGATATCAAACGA |
| 416 | 1F10 | artificial | aa | EIVLTQSPGTLSLSPGERATLSCRASRSISSSYLAWYQQKPGQ |
| | | | | APRLLIYGPSSRATGIPDRFSGSGSGTDFTLTISRLEPEDFAV |
| | | | | YYCQQYGSSFTFGPGTKVDIKR |
| 417 | 4A9 | artificial | nt | CAGTCTGTGCTGACGCAGCCGCCCTCAGTGTCTGGGGCCCCAG |
| | | | | GACAGAGGGTCACCATCTCCTGCACTGGGAGCAGCTCCAACAT |
| | | | | CGGGACAGGTTATGCTGTACACTGGTACCAGCAGTTTCCAGGA |
| | | | | ACAGCCCCCAAACTCCTCATCTATGGTAACAACAATCGGCCCT |
| | | | | CAGGGGTTCCTGACCGATTCTCTGGCTCCAAGTCTGGCACCTC |
| | | | | AGCCTCCCTGGCCATCACTGGGCTCCAGGCTGAGGATGAGGCT |
| | | | | GATTATTACTGCCAGTCCTATGACAGCAGACTGAGTGGTTGGG |
| | | | | TGTTCGGCGGAGGGACCAAGCTGACCGTCCTAGGT |
| 418 | 4A9 | artificial | aa | QSVLTQPPSVSGAPGQRVTISCTGSSSNIGTGYAVHWYQQFPG |
| | | | | TAPKLLIYGNNNRPSGVPDRFSGSKSGTSASLAITGLQAEDEA |
| | | | | DYYCQSYDSRLSGWVFGGGTKLTVLG |
| 419 | 4F7 | artificial | nt | CAGTCTGTgcTGACGCAGCCGCCCTCAGTGTCTGGGGCCCCAG |
| | | | | GGCAGAGGGTCACCATCTCCTGCACTGGGAGCAGCTCCAATAT |
| | | | | CGGGACAGGTTATGATGTACACTGGTATCAGCAGcttcCAGGA |
| | | | | ACAGCCCCCAAACTCCTCATCCATGGTAACAGCAATCGGCCCT |
| | | | | CAGGGGTCCCTGACCGATTCTCTGGCTCCAAGTCTGGCACCTC |
| | | | | AGCCTCCCTGGCCATCACTGGGCTCCAGGCTGAGGATGAGGCT |
| | | | | GATTATTACTGCCAGTCCTATGACAGCAGTCTGAGTGGTTGGG |
| | | | | TGTTCGGCGGAGGGACCAGGTTGACCGTCCTAGGT |
| 420 | 4F7 | artificial | aa | QSVLTQPPSVSGAPGQRVTISCTGSSSNIGTGYDVHWYQQLPG |
| | | | | TAPKLLIHGNSNRPSGVPDRFSGSKSGTSASLAITGLQAEDEA |
| | | | | DYYCQSYDSSLSGWVFGGGTRLTVLG |
| 421 | 22D1 | artificial | nt | CAGTCTGCGCTGACTCAGCCACCCTCAGCGACTGGGACCCCCG |
| | | | | GGCAGAGGGTCACCATCTCTTGTTCTGGAAGCAGCTCCAACAT |
| | | | | CGGAAGCAATTTTGTAAACTGGTACAAGCAGCTCCCAGGAACG |
| | | | | GCCCCCAAAGTCCTCATCTATACTAATAATCAGCGGCCCTCAG |
| | | | | GGGTCCCTGACCGATTCTCTGGCTCCAAGTCTGGCACCTCAGC |
| | | | | CTCCCTGGCCATCAGTGGGCTCCAGTCTGAGGATGAGTCTGAT |
| | | | | TATTACTGTGCAACATGGGATGACAGTATGAATGGTTGGGTGT |
| | | | | TCGGCGGAGGGACCAAGCTGACCGTCCTAGGT |
| 422 | 22D1 | artificial | aa | QSALTQPPSATGTPGQRVTISCSGSSSNIGSNFVNWYKQLPGT |
| | | | | APKVLIYTNNQRPSGVPDRFSGSKSGTSASLAISGLQSEDESD |
| | | | | YYCATWDDSMNGWVFGGGTKLTVLG |
| 423 | 19B5 | artificial | nt | CAGTCTGCGCTGACTCAGCCACCCTCAACGACTGGGACCCCCG |
| | | | | GGCAGAGGGTCACCATCTCTTGTTCTGGAAGCAGGTCCAACAT |
| | | | | CGGAAGCAATTTTGTAAACTGGTACAAGCAGCTCCCAGGAACG |
| | | | | GCCCCCAAAGTCCTCATCTATACTAATAATCAGCGGCCCTCAG |
| | | | | GGGTCCCTGACCGATTCTCTGGCTCCAAGTCTGGCACCTCAGC |
| | | | | CTCCCTGGCCATCAGTGGGCTCCAGTCTGAGGATGAGTCTGAT |
| | | | | TATTACTGCGCAACATGGGATGACAGTATGAATGGTTGGGTGT |
| | | | | TCGGCGGAGGGACCAAACTGACCGTCCTAGGT |
| 424 | 19B5 | artificial | aa | QSALTQPPSTTGTPGQRVTISCSGSRSNIGSNFVNWYKQLPGT |
| | | | | APKVLIYTNNQRPSGVPDRFSGSKSGTSASLAISGLQSEDESD |
| | | | | YYCATWDDSMNGWVFGGGTKLTVLG |
| 425 | 25F8 | artificial | nt | CAGTCTGCGCTGactCAGCCACCCTCAGCGACTGGGACCCCCG |
| | | | | GGCAGAGGGTCACCATCTCTTGTTCTGGAAGCAGCTCCAACAT |
| | | | | CGGAAGGAATTTTGTAAACTGGTATAAGCAGCTCCCAGGAACG |
| | | | | GCCCCCAAAGTCCTCATTTATACTAATAATCAGCGGCCCTCAG |
| | | | | GGGTCCCTGACCGATTCTCTGGCTCCAAGTCTGGCACCTCAGC |
| | | | | CTCCCTGGCCATCAGTGGGCTCCAGTCTGAGGATGAGTCTGAT |
| | | | | TATTACTGTGCAGCATGGGATGACAGCCTGAATGGTTGGGTGT |
| | | | | TCGGCGGAGGGACCAAGCTGACCGTCCTAGGT |
| 426 | 25F8 | artificial | aa | QSALTQPPSATGTPGQRVTISCSGSSSNIGRNFVNWYKQLPGT |
| | | | | APKVLIYTNNQRPSGVPDRFSGSKSGTSASLAISGLQSEDESD |
| | | | | YYCAAWDDSLNGWVFGGGTKLTVLG |
| 427 | 26D1 | artificial | nt | CACTCTGTGCTGACTCAGTCACCCTCAGCGTCTGGGACCCCCG |
| | | | | GACAGAGGGTCACCATCTCTTGTTCTGGAAGCCGCTCCAACAT |
| | | | | CGGAAGTAATTTTGTAAACTGGTACCAGCAGCTCCCAGGAACG |
| | | | | GCCCCCAAACTCCTCATCTATACTAATAATCAGCGGCCCTCAG |
| | | | | GGGTCCCTGACCGATTCTCTGGCTCCAAGTCTGGCACCTCAGC |
| | | | | CTCCCTGGCCATCAGTGGGCTCCAGTCTGAGGATGAGGCTGAT |
| | | | | TATTACTGTGCAGTATGGGATGACAGCCTGAATGGTTGGGTGT |
| | | | | TCGGCGGAGGGACCAAGCTGACCGTCCTAGGT |
| 428 | 26D1 | artificial | aa | HSVLTQSPSASGTPGQRVTISCSGSRSNIGSNFVNWYQQLPGT |
| | | | | APKLLIYTNNQRPSGVPDRFSGSKSGTSASLAISGLQSEDEAD |
| | | | | YYCAVWDDSLNGWVFGGGTKLTVLG |
| 429 | 4D2 | artificial | nt | GAAATTGTATTGACGCAGTCTCCAGGCACCCTGTCTTTGTCTC |
| | | | | CAGGGGAAAGAGCCACCCTCTCCTGCAGGGCCAGTCAGAGTGT |
| | | | | TAGCAACACCTACTTAGCCTGGTACCATCAGAGACCTGGCCAG |
| | | | | GCTCCCAGGCTCCTCATCTATGGTGCATCCAGCAGGGCCGCTG |
| | | | | GCATCCCAGACAGGTTCAGTGGCAGTGGGTCTGGGACAGACTT |
| | | | | CACTCTCACCATCAGCAGACTGGAGCCTGAAGATTTTGCAGTG |
| | | | | TATTACTGTCAGCAGTATAGTAACTCGTGGACGTTCGGCCAAG |
| | | | | GGACCAAGGTGGAAATCAAACGA |
| 430 | 4D2 | artificial | aa | EIVLTQSPGTLSLSPGERATLSCRASQSVSNTYLAWYHQRPGQ |
| | | | | APRLLIYGASSRAAGIPDRFSGSGSGTDFTLTISRLEPEDFAV |
| | | | | YYCQQYSNSWTFGQGTKVEIKR |
| 431 | 4E10 | artificial | nt | GAAATTGTGTTGACGCAGTCTCCAGGCACCCTGTCTTTGTCTC |
| | | | | CAGGGGAAAGAGCCACCCTCTCCTGCAGGGCCAGTCAGAGTGT |
| | | | | TGGCAGCAGCTACTTAGCCTGGTACCAGCAGAAACCTGGCCAG |
| | | | | GCTCCCAGGCTCCTCATCTATGGTGCATCCAGCAGGGTCACTG |
| | | | | GCATCCCAGACAGGTTCAGTGGCAGTGGGTCTGGGACAGATTT |
| | | | | CACTCTCACCATCAGCAGACTGGAGCCTGAAGATTTTGCAGTG |
| | | | | TATTACTGTCAGCAATATAGTAACTCGTGGACGTTCGGCCAAG |
| | | | | GGACCAAGGTGGAAATCAAACGA |
| 432 | 4E10 | artificial | aa | EIVLTQSPGTLSLSPGERATLSCRASQSVGSSYLAWYQQKPGQ |
| | | | | APRLLIYGASSRVTGIPDRFSGSGSGTDFTLTISRLEPEDFAV |
| | | | | YYCQQYSNSWTFGQGTKVEIKR |
| 433 | 22G10 | artificial | nt | GAAATAGTGATGACGCAGTCTCCAGTCACCCTGTCTCTGTCTC |
| | | | | TAGGGGAAAGAGCCACCCTCTCCTGCAGGGCCAGTCAGAGTAT |
| | | | | TAGCAGCAACTTAGCCTGGTTCCAGCAGAAACCTGGCCAGGCT |
| | | | | CCCAGACTCCTCATCTATGGTGCATTTACCAGGGCCACTGGTA |
| | | | | TCCCAGCCAGGGTCAGTGGCAGTGGGTCTGGGACAGAGTTCAC |
| | | | | TCTCACCATCAGCAGCCTGCAGTCTGAAGATTTTGCAGTTTAT |
| | | | | TACTGTCAGCAGTATAATTACTGGCCGCTCACTTTCGGCGGAG |
| | | | | GGACCAAGGTGGAGATCAAGCGA |
| 434 | 22G10 | artificial | aa | EIVMTQSPVTLSLSLGERATLSCRASQSISSNLAWFQQKPGQA |
| | | | | PRLLIYGAFTRATGIPARVSGSGSGTEFTLTISSLQSEDFAVY |
| | | | | YCQQYNYWPLTFGGGTKVEIKR |
| 435 | 2C12_LC#1 | artificial | nt | GATGTTGTGATGactCAGtCTccActctccctgcCCGTCACCC |
| | | | | TTGGACAGCCGGcctCCAtctcctgCAGGtCTAGTCAAAGcct |
| | | | | cgtaTACAGTGATGGAAACAcctACTTGAATTGGTTTCAGCAG |
| | | | | AGGCCAGGCCAATCTCCAAGGcgcctaATTTATAAGGTTTCTA |
| | | | | ACTGGGactctGGGGtCCCAGACAGATTCAGCgGCAGTGGGTC |
| | | | | AGGCActGATTTCACactGAAAAtCAGCAGGGTGGaggctgaG |
| | | | | GATGTTGGGGTTTATTactgCATGCAAGGTATAGTGTGGCCGT |
| | | | | GCAGTTTTGGCCAGGGGACCAAGCTGGAGATCAAaCgA |
| 436 | 2C12_LC#1 | artificial | aa | DVVMTQSPLSLPVTLGQPASISCRSSQSLVYSDGNTYLNWFQQ |
| | | | | RPGQSPRRLIYKVSNWDSGVPDRFSGSGSGTDFTLKISRVEAE |
| | | | | DVGVYYCMQGIVWPCSFGQGTKLEIKR |
| 437 | 2H12_LC#2 | artificial | nt | GATGTTGTGATGACTCAGTCTCCACTCTCCCTGCCCGTCACCC |
| | | | | TTGGACAGCCGGCCTCCATCTCCTGCAGGTCTAGTCAAAGCCT |
| | | | | CGTATACAGTGATGGAAACACCTACTTGAATTGGTTTCAGCAG |
| | | | | AGGCCAGGCCAATCTCCAAGGCGCCTAATTTATAAGGTTTCTA |
| | | | | ACTGGGACTCTGGGGTCCCAGACAGAATCAGCGGCAGTGGGTC |
| | | | | AGGCACCGATTTCACACTGAAAATCAGCAGGGTGGAGGCTGAG |
| | | | | GATGTTGGGGTTTATTACTGCATGCAAGATACACTGTGGCCGT |
| | | | | GCAGTTTTGGCCAGGGGACCAAGCTGGAGATCAAACGA |
| 438 | 2H12_LC#2 | artificial | aa | DVVMTQSPLSLPVTLGQPASISCRSSQSLVYSDGNTYLNWFQQ |
| | | | | RPGQSPRRLIYKVSNWDSGVPDRISGSGSGTDFTLKISRVEAE |
| | | | | DVGVYYCMQDTLWPCSFGQGTKLEIKR |
| 439 | 2G6_LC#1 | artificial | nt | GaTGTTGTGATGACTCagtctccACTCTCCCTGCCCGTCACCC |
| | | | | ttggacaGCCGGCCTccaTCTCCTGCAGGTCTAGTCAAAGCCT |
| | | | | CGTATACAGTGATGGAAACACCTACTTGAATTGGTTTCAGCAG |
| | | | | AGGCCAGGCCAATCTCCACGGCGCCTAATTTATCAGGTTTCTA |
| | | | | ACTGGGACTCTGGGGTCCCAGACAGATTCAGCGGCAGTGGGTC |
| | | | | AGGCACTGATTTCACACTGAAAATCAGCAGGGTGGAGGCTGAG |
| | | | | GATGTTGGGATTTATTACTGCATGCAAGATACACTGTGGCCGT |
| | | | | GCAGTTTTGGCCAGGGGACCAAGCTGGAGATCAAACGA |
| 440 | 2G6_LC#1 | artificial | aa | DVVMTQSPLSLPVTLGQPASISCRSSQSLVYSDGNTYLNWFQQ |
| | | | | RPGQSPRRLIYQVSNWDSGVPDRFSGSGSGTDFTLKISRVEAE |
| | | | | DVGIYYCMQDTLWPCSFGQGTKLEIKR |
| 441 | 2H12 | artificial | nt | TCCTATGAGCTGACTCAGCCACCCTCAGTGTCCGTGTCCCCAG |
| | | | | GACAGACAGCCAGCATCACCTGCTCTGGAGATAGATTGGGGGA |
| | | | | AAAATATACTTGCTGGTATCAGCAGAGGCCAGGCCAGTCCCCT |
| | | | | TTGCTGGTCATCTATCAAGATACCAAGCGGCCCTCAGGGATCC |
| | | | | CTGAGCGATTCTCTGGCTCCAACTCTGGTAACACAGCCACTCT |
| | | | | GACCATCAGCGGGACCCAGCCTATGGATGAGGCTGACTATTAC |
| | | | | TGTCAGGCGTGGGACAGCAGCACTGTGGTATTCGGCGGAGGGA |
| | | | | CCAAGCTGACCGTCCtAGGT |
| 442 | 2H12 | artificial | aa | SYELTQPPSVSVSPGQTASITCSGDRLGEKYTCWYQQRPGQSP |
| | | | | LLVIYQDTKRPSGIPERFSGSNSGNTATLTISGTQPMDEADYY |
| | | | | CQAWDSSTVVFGGGTKLTVLG |
| 443 | 2G6 | artificial | nt | TCCTATGAACTGACTCAGCCACCCTCAGTGTCCGTGTCCCCAG |
| | | | | GACAGACAGCCAGCATCACCTGCTCTGGAGATAGGTTGGGGGA |
| | | | | AAAATATACTTGCTGGTATCAGCAGAGGCCAGGCCAGTCCCCT |
| | | | | TTGCTGGTCATCTATCAAGATACCAAGCGGCCCTCAGGGATCC |
| | | | | CTGAGCGATTCTCTGGCTCCAACTCTGGTAACACAGCCACTCT |
| | | | | GACCATCAGCGGGACCCAGGCTATGGATGAGGCTGACTATTAC |
| | | | | TGTCAGGCGTGGGACAGCAGCACTGTGGTATTCGGCGGAGGGA |
| | | | | CCAAGCTGACCGTCCTAGGT |
| 444 | 2G6 | artificial | aa | SYELTQPPSVSVSPGQTASITCSGDRLGEKYTCWYQQRPGQSP |
| | | | | LLVIYQDTKRPSGIPERFSGSNSGNTATLTISGTQAMDEADYY |
| | | | | CQAWDSSTVVFGGGTKLTVLG |
| 445 | 23A10 | artificial | nt | TCCTATGAGCTGACTCAGCCACCCTCAGTGTCCGTGTCCCCAG |
| | | | | GACAGACAGCCAGCATCACCTGCTCTGGAGATAGATTGGGGGA |
| | | | | GAAATATGTTTGCTGGTATCAGCAGAAGCCAGGCCAGTCCCCT |
| | | | | ATACTGGTCATCTATCAAGATAATAAGTGGCCCTCAGGGATCC |
| | | | | CTGAGCGATTCTCTGGCTCCAACTCTGGGAACACAGCCACTCT |
| | | | | GACCATCAGCGGGACCCAGGCTATGGATGAGGCTGACTATTAC |
| | | | | TGTCAGGCGTGGGACAGCAGCACTGTGGTATTCGGCGGGGGGA |
| | | | | CCAAGCTGACCGTCCTAGGT |
| 446 | 23A10 | artificial | aa | SYELTQPPSVSVSPGQTASITCSGDRLGEKYVCWYQQKPGQSP |
| | | | | ILVIYQDNKWPSGIPERFSGSNSGNTATLTISGTQAMDEADYY |
| | | | | CQAWDSSTVVFGGGTKLTVLG |
| 447 | 5E3 | artificial | nt | TCCTATGAGCTGACTCAGCCACCCTCAGTGTCCGTGTCCCCAG |
| | | | | GACAGACAGCCAGCATCACCTGCTCTGGAGATAAATTGGGGGA |
| | | | | TGAATATGCTTGCTGGTATCAGCAGAAGCCAGGCCAGTCCCCT |
| | | | | GTGCTGGTCATCTATCAAGATAGCAAGCGGCCCTCAGGGATCC |
| | | | | CTGAGCGATTCTCTGGCTCCAACTCTGGGAACACAGCCACTCT |
| | | | | GACCATCAGCGGGACCCAGGCTATGGATGAGGCTGACTATTAC |
| | | | | TGTCAGGCGTGGGACAGCAGCACTGTGGTATTCGGCGGAGGGA |
| | | | | CCAAGCTGACCGTCCTAGGT |
| 448 | 5E3 | artificial | aa | SYELTQPPSVSVSPGQTASITCSGDKLGDEYACWYQQKPGQSP |
| | | | | VLVIYQDSKRPSGIPERFSGSNSGNTATLTISGTQAMDEADYY |
| | | | | CQAWDSSTVVFGGGTKLTVLG |

TABLE IIc
Heavy Chain Variable Region Polynucleotide and Amino acid Sequences

13586_HC [hu anti-<huCDH19> 4F3 VH]
QVQLVESGGGVVQPGRSLRLSCAASGFSFSSYDMDWVRQTPGKGLEWVAVIWYDGSNKYYADSVRG
RFTISRDNSKNTLFLQMNSLRVEDTAVYYCARETGEGWYFDLWGRGTLVTVSS
SEQ ID NO: 449
13589_HC [hu anti-<huCDH19> 4A9 VH]
QVQLQESGPGLVKPSETLSLTCTVSGGSISGYYWSWIRQPPGKGLEWFAYFSYSGSTNYNPSLKSRVTLS
VDTSKNQFSLKLSSVTAADTAVYYCARNWAFHFDFWGQGTLVTVSS
SEQ ID NO: 450
13590_HC [hu anti-<huCDH19> 4B10 VH]
QVQLVESGGGVVQPGRSLRLSCAASGFTFSSYDMHWVRQAPGKGLEWVAVISYDGTNEYYADSVKGR
FTISRDTSKNTLYLQMNSLRAEDTAVYYCARERYFDWSFDYWGQGTLVSVSS
SEQ ID NO: 451
13874_HC [hu anti-<huCDH19> 17H8.2 VH]
QVQLQESGPGLVKPSETLSLTCTVSGGSINSYYWSWIRQPPGKGLEWIGYIYYIGSTNYNPSLKSRVTISV
DTSKNQFSLKLSSVTAADTALYYCARDSRYRSGWYDAFDIWGQGTMVTVSS
SEQ ID NO: 452
13875_HC [hu anti-<huCDH19> 16C1.1 VH]
QVQLQESGPGLVKPSETLSLTCTVSGGSISGYYWSWIRQPPGKGLEWIGYIYYIGSTNYNPSLKSRVTMS
IDTSKNQFSLTLSSLTAADTAVYFCARDGSSGWYRWFDPWGQGTLVTVSS
SEQ ID NO: 453
13876_HC [hu anti-<huCDH19> 16A4.1 VH]
QVQLQESGPGLAKPSETLSLTCTVSGDSITSYYWSWIRQPPGKGLEWIGYIYYSGSTNYNPSLKSRVTISV
DTSKNQFSLKLSSVTAADTAVYYCARDQRRIAAAGTHFYGMDVWGQGTTVTVSS
SEQ ID NO: 454
13877_HC [hu anti-<huCDH19> 22G10.1 VH]
EVQLLESGGGLVQPGGSLRLSCAASGFTFSSYAMNWVRQAPGKGLEWVSTISGGGANTYYADSVKGR
FTISSDNSKSTLYLQMNSLRAADTAVYHCAKGGMGGYYYGMDVWGQGTTVTVSS
SEQ ID NO: 455
13878_HC [hu anti-<huCDH19> 20D3.1 VH]
QVQLVQSGAEVKKPGASVKVSCKVSGYTFTSYFIHWVRQAPGQGLEWMGIINPISVSTSYAQKFQGRV
TMTRDTSTSTVFMELSSLRSEDTAVYYCARGGIQLWLHFDYWGQGTLVTVSS
SEQ ID NO: 456
13879_HC [hu anti-<huCDH19> 22D1.1 VH]
QVQLVQSGAEVKKPGASVRVSCKVSGYTFTSYFIHWVRQAPGQGLEWMGIINPISVSTSYAQKFQGRV
TMTRDTSTSTVFMELSSLRSEDTAVYYCARGGIQLWLHLDYWGQGTLVTVSS
SEQ ID NO: 457
13880_HC [hu anti-<huCDH19> 25F8.1 VH]
QVQLVQSGAEVKKPGASVKVSCKASGYTFTSYYTHWVRQAPGQGLEWMGIINPSGGSTRYAQKFQGR
VTMTRDTSTSTVFMELSSLRSEDTAVYYCARGGIQLWLHFDYWGQGTLVTVSS
SEQ ID NO: 458
13881_HC [hu anti-<huCDH19> 26F12.1 VH]
QVQLVQSGAEVKKPGASVKVSCKASRYTFTNYYMSWVRQAPGQGLEWMGIINPSGGDSTYAQKFQG
RLTMTGDTSTSTVYMELSSLRSEDTAVYYCARGGIQLWLHFDYWGQGTLVTVSS
SEQ ID NO: 459
13882_HC [hu anti-<huCDH19> 26D1.1 VH]
QVQLVQSGAEVKKPGASVKVSCKASRYTFTSYYMSWVRQAPGQGLEWMGIIHPSGGDTTYAQKFQGR
VTMTGDTSTSTVYMELSSLRSEDTAVYYCARGGIKLWLHFDYWGQGTLVTVSS
SEQ ID NO: 460
13883_HC [hu anti-<huCDH19> 25G10.1 VH]
QVQLQESGPGLVKPSETLSLTCTVSGGSISGYYWSWIRQPPGKGLEWIGYIYYIGSTNYNPSLKSRVTMS
VDTSKNQFSLKLSSVTAADTAVYYCARDGSSGWYRWFDPWGQGTLVTVSS
SEQ ID NO: 461
13885_HC [hu anti-<huCDH19> 19B5.1 VH]
QVQLVQSGAEVKKPGASVKVSCKVSGYTFTSYFIHWVRQAPGQGLEWMGIINPISVSTSYAQKFQGRV
TMTRDTSTSTVFMELSSLRSEDTAVYYCARGGIQLWLHLDYWGQGTLVTVSS
SEQ ID NO: 462
14022_HC [hu anti-< huCDH19> 4A2 VH]
QVQLQESGPGLVKPSQTLSLTCTVSGGSISSSGYYWSWIRQHPGKGLEWIGYIYYTGSAYYNPSLKSRV
TISVDTSKNQFSLKLSSVTAADTAVYYCARDGSSGWYFQYWGQGTLVTVSS
SEQ ID NO: 463
14024_HC [hu anti-<huCDH19> 4A2 (1-472)(Q17E,H47P) VH]
QVQLQESGPGLVKPSETLSLTCTVSGGSISSSGYYWSWIRQPPGKGLEWIGYIYYTGSAYYNPSLKSRVT
ISVDTSKNQFSLKLSSVTAADTAVYYCARDGSSGWYFQYWGQGTLVTVSS
SEQ ID NO: 464
14025_HC [hu anti-<huCDH19> 4A2 VH]
QVQLQESGPGLVKPSQTLSLTCTVSGGSISSSGYYWSWIRQHPGKGLEWIGYIYYTGSAYYNPSLKSRV
TISVDTSKNQFSLKLSSVTAADTAVYYCARDGSSGWYFQYWGQGTLVTVSS
SEQ ID NO: 465
14026_HC [hu anti-<huCDH19> 4A2 (1-472)(Q17E,H47P) VH]
QVQLQESGPGLVKPSETLSLTCTVSGGSISSSGYYWSWIRQPPGKGLEWIGYIYYTGSAYYNPSLKSRVT
ISVDTSKNQFSLKLSSVTAADTAVYYCARDGSSGWYFQYWGQGTLVTVSS
SEQ ID NO: 466
14027_HC [hu anti-<huCDH19>4A2 (1-472)(Q17E,H47P,D111E) VH]
QVQLQESGPGLVKPSETLSLTCTVSGGSISSSGYYWSWIRQPPGKGLEWIGYIYYTGSAYYNPSLKSRVT
ISVDTSKNQFSLKLSSVTAADTAVYYCAREGSSGWYFQYWGQGTLVTVSS
SEQ ID NO: 467
14028_HC [hu anti-<huCDH19> 4A2 (1-472)(Q17E,H47P,D111E,W134Y) VH]
QVQLQESGPGLVKPSETLSLTCTVSGGSISSSGYYWSWIRQPPGKGLEWIGYIYYTGSAYYNPSLKSRVT
ISVDTSKNQFSLKLSSVTAADTAVYYCAREGSSGYYFQYWGQGTLVTVSS
SEQ ID NO: 468
14029_HC [hu anti-<huCDH19> 4A2 VH]
QVQLQESGPGLVKPSQTLSLTCTVSGGSISSSGYYWSWIRQHPGKGLEWIGYIYYTGSAYYNPSLKSRV
TISVDTSKNQFSLKLSSVTAADTAVYYCARDGSSGWYFQYWGQGTLVTVSS
SEQ ID NO: 469
14030_HC [hu anti-<huCDH19> 4F3 (1-471)(R17G) VH]
QVQLVESGGGVVQPGGSLRLSCAASGFSFSSYDMDWVRQTPGKGLEWVAVIWYDGSNKYYADSVRG
RFTISRDNSKNTLFLQMNSLRVEDTAVYYCARETGEGWYFDLWGRGTLVTVSS
SEQ ID NO: 470
14031_HC [hu anti-<huCDH19> 4F3 (1-471)(R17G,T47A) VH]
QVQLVESGGGVVQPGGSLRLSCAASGFSFSSYDMDWVRQAPGKGLEWVAVIWYDGSNKYYADSVRG
RFTISRDNSKNTLFLQMNSLRVEDTAVYYCARETGEGWYFDLWGRGTLVTVSS
SEQ ID NO: 471
14032_HC [hu anti-<huCDH19> 4F3 (1-471)(R17G,T47A,R141Q) VH]
QVQLVESGGGVVQPGGSLRLSCAASGFSFSSYDMDWVRQAPGKGLEWVAVIWYDGSNKYYADSVRG
RFTISRDNSKNTLFLQMNSLRVEDTAVYYCARETGEGWYFDLWGQGTLVTVSS
SEQ ID NO: 472
14033_HC [hu anti-<huCDH19> 4F3 (1-471)(R17G,T47A,D61E,D72E,R141Q) VH]
QVQLVESGGGVVQPGGSLRLSCAASGFSFSSYDMDWVRQAPGKGLEWVAVIWYEGSNKYYAESVRG
RFTISRDNSKNTLFLQMNSLRVEDTAVYYCARETGEGWYFDLWGQGTLVTVSS
SEQ ID NO: 473
14034_HC [hu anti-<huCDH19> 4F3 (1-471)(R17G,T47A,D61E,D72E,W134Y,R141Q) VH]
QVQLVESGGGVVQPGGSLRLSCAASGFSFSSYDMDWVRQAPGKGLEWVAVIWYEGSNKYYAESVRG
RFTISRDNSKNTLFLQMNSLRVEDTAVYYCARETGEGYYFDLWGQGTLVTVSS
SEQ ID NO: 474
14039_HC [hu anti-<huCDH19> 2G6 (1-477)(R17G,D61E,D72E,K94N) VH]
QVQLVESGGGVVQPGGSLRLSCAASGFTFSSYGMHWVRQAPGKGLEWVAFIWYEGSNKYYAESVKD
RFTISRDNSKNTLYLQMNSLRAEDTAVYYCARRAGIIGTIGYYYGMDVWGQGTTVTVSS
SEQ ID NO: 475
14040_HC [hu anti-<huCDH19> 16C1.1 VH]
QVQLQESGPGLVKPSETLSLTCTVSGGSISGYYWSWIRQPPGKGLEWIGYIYYIGSTNYNPSLKSRVTMS
IDTSKNQFSLTLSSLTAADTAVYFCARDGSSGWYRWFDPWGQGTLVTVSS
SEQ ID NO: 476
14041_HC [hu anti-<huCDH19> 16C1.1 (1-469)(T92K) VH]
QVQLQESGPGLVKPSETLSLTCTVSGGSISGYYWSWIRQPPGKGLEWIGYIYYIGSTNYNPSLKSRVTMS
IDTSKNQFSLKLSSLTAADTAVYFCARDGSSGWYRWFDPWGQGTLVTVSS
SEQ ID NO: 477
14042_HC [hu anti-<huCDH19> 16C1.1 (1-469)(T92K,D109E) VH]
QVQLQESGPGLVKPSETLSLTCTVSGGSISGYYWSWIRQPPGKGLEWIGYIYYIGSTNYNPSLKSRVTMS
IDTSKNQFSLKLSSLTAADTAVYFCAREGSSGWYRWFDPWGQGTLVTVSS
SEQ ID NO: 478
14043_HC [hu anti-<huCDH19> 16C1.1 (1-469)(T92K,W132Y,W135Y) VH]
QVQLQESGPGLVKPSETLSLTCTVSGGSISGYYWSWIRQPPGKGLEWIGYIYYIGSTNYNPSLKSRVTMS
IDTSKNQFSLKLSSLTAADTAVYFCARDGSSGYYRYFDPWGQGTLVTVSS
SEQ ID NO: 479
14044_HC [hu anti-<huCDH19> 16C1.1 (1-469)(T92K) VH]
QVQLQESGPGLVKPSETLSLTCTVSGGSISGYYWSWIRQPPGKGLEWIGYIYYIGSTNYNPSLKSRVTMS
IDTSKNQFSLKLSSLTAADTAVYFCARDGSSGWYRWFDPWGQGTLVTVSS
SEQ ID NO: 480
14045_HC [hu anti-<huCDH19> 17H8.2 VH]
QVQLQESGPGLVKPSETLSLTCTVSGGSINSYYWSWIRQPPGKGLEWIGYIYYIGSTNYNPSLKSRVTISV
DTSKNQFSLKLSSVTAADTALYYCARDSRYRSGWYDAFDIWGQGTMVTVSS
SEQ ID NO: 481
14046_HC [hu anti-<huCDH19> 17H8.2 (1-471)(D109E) VH]
QVQLQESGPGLVKPSETLSLTCTVSGGSINSYYWSWIRQPPGKGLEWIGYIYYIGSTNYNPSLKSRVTISV
DTSKNQFSLKLSSVTAADTALYYCARESRYRSGWYDAFDIWGQGTMVTVSS
SEQ ID NO: 482
14047_HC [hu anti-<huCDH19> 17H8.2 (1-471)(D109E,W132Y) VH]
QVQLQESGPGLVKPSETLSLTCTVSGGSINSYYWSWIRQPPGKGLEWIGYIYYIGSTNYNPSLKSRVTISV
DTSKNQFSLKLSSVTAADTALYYCARESRYRSGYYDAFDIWGQGTMVTVSS
SEQ ID NO: 483
14048_HC [hu anti-<huCDH19> 17H8.2 (1-471)(D109E) VH]
QVQLQESGPGLVKPSETLSLTCTVSGGSINSYYWSWIRQPPGKGLEWIGYIYYIGSTNYNPSLKSRVTISV
DTSKNQFSLKLSSVTAADTALYYCARESRYRSGWYDAFDIWGQGTMVTVSS
SEQ ID NO: 484
14049_HC [hu anti-<huCDH19> 4F7 VH]
QVQLQESGPGLVKPSETLSLTCTVSGGSISSYSWSWIRQPPGKGLEWIGYIYYSGSTNYNPSLKSRVTISL
DTSKNQFSLKLSSVTAADTAVYYCARNWAFHFDYWGQGTLVTVSS
SEQ ID NO: 485
14050_HC [hu anti-<huCDH19> 4F7 VH]
QVQLQESGPGLVKPSETLSLTCTVSGGSISSYSWSWIRQPPGKGLEWIGYIYYSGSTNYNPSLKSRVTISL
DTSKNQFSLKLSSVTAADTAVYYCARNWAFHFDYWGQGTLVTVSS
SEQ ID NO: 486
14051_HC [hu anti-<huCDH19> 4F7 (1-468)(W113Y) VH]
QVQLQESGPGLVKPSETLSLTCTVSGGSISSYSWSWIRQPPGKGLEWIGYIYYSGSTNYNPSLKSRVTISL
DTSKNQFSLKLSSVTAADTAVYYCARNYAFHFDYWGQGTLVTVSS
SEQ ID NO: 487
14052_HC [hu anti-<huCDH19> 4B10 (1-471)(R17G,D61E,D72E,W134Y) VH]
QVQLVESGGGVVQPGGSLRLSCAASGFTFSSYDMHWVRQAPGKGLEWVAVISYEGTNEYYAESVKGR
FTISRDTSKNTLYLQMNSLRAEDTAVYYCARERYFDYSFDYWGQGTLVSVSS
SEQ ID NO: 488
14053_HC [hu anti-<huCDH19> 4B10 VH]
QVQLVESGGGVVQPGRSLRLSCAASGFTFSSYDMHWVRQAPGKGLEWVAVISYDGTNEYYADSVKGR
FTISRDTSKNTLYLQMNSLRAEDTAVYYCARERYFDWSFDYWGQGTLVSVSS
SEQ ID NO: 489
14054_HC [hu anti-<huCDH19> 4B10 (1-471)(R17G) VH]
QVQLVESGGGVVQPGGSLRLSCAASGFTFSSYDMHWVRQAPGKGLEWVAVISYDGTNEYYADSVKG
RFTISRDTSKNTLYLQMNSLRAEDTAVYYCARERYFDWSFDYWGQGTLVSVSS
SEQ ID NO: 490
14055_HC [hu anti-<huCDH19> 4B10 (1-471)(R17G,D61E,D72E) VH]
QVQLVESGGGVVQPGGSLRLSCAASGFTFSSYDMHWVRQAPGKGLEWVAVISYEGTNEYYAESVKGR
FTISRDTSKNTLYLQMNSLRAEDTAVYYCARERYFDWSFDYWGQGTLVSVSS
SEQ ID NO: 491
14056_HC [hu anti-<huCDH19> 4A9 VH]
QVQLQESGPGLVKPSETLSLTCTVSGGSISGYYWSWIRQPPGKGLEWFAYFSYSGSTNYNPSLKSRVTLS
VDTSKNQFSLKLSSVTAADTAVYYCARNWAFHFDFWGQGTLVTVSS
SEQ ID NO: 492
14057_HC [hu anti-<huCDH19> 4A9 (1-468)(F55I,A56G) VH]
QVQLQESGPGLVKPSETLSLTCTVSGGSISGYYWSWIRQPPGKGLEWIGYFSYSGSTNYNPSLKSRVTLS
VDTSKNQFSLKLSSVTAADTAVYYCARNWAFHFDFWGQGTLVTVSS
SEQ ID NO: 493
14058_HC [hu anti-<huCDH19> 4A9 (1-468)(F55I,A56G) VH]
QVQLQESGPGLVKPSETLSLTCTVSGGSISGYYWSWIRQPPGKGLEWIGYFSYSGSTNYNPSLKSRVTLS
VDTSKNQFSLKLSSVTAADTAVYYCARNWAFHFDFWGQGTLVTVSS
SEQ ID NO: 494
14059_HC [hu anti-<huCDH19> 4A9 (1-468)(F551,A56G,W113Y) VH]
QVQLQESGPGLVKPSETLSLTCTVSGGSISGYYWSWIRQPPGKGLEWIGYFSYSGSTNYNPSLKSRVTLS
VDTSKNQFSLKLSSVTAADTAVYYCARNYAFHFDFWGQGTLVTVSS
SEQ ID NO: 495
14060_HC [hu anti-<huCDH19> 20D3.1 VH]
QVQLVQSGAEVKKPGASVKVSCKVSGYTFTSYFIHWVRQAPGQGLEWMGIINPISVSTSYAQKFQGRV
TMTRDTSTSTVFMELSSLRSEDTAVYYCARGGIQLWLHFDYWGQGTLVTVSS
SEQ ID NO: 496
14061_HC [hu anti-<huCDH19> 20D3.1 VH]
QVQLVQSGAEVKKPGASVKVSCKVSGYTFTSYFIHWVRQAPGQGLEWMGIINPISVSTSYAQKFQGRV
TMTRDTSTSTVFMELSSLRSEDTAVYYCARGGIQLWLHFDYWGQGTLVTVSS
SEQ ID NO: 497
14062_HC [hu anti-<huCDH19> 20D3.1 (1-469)(W133Y) VH]
QVQLVQSGAEVKKPGASVKVSCKVSGYTFTSYFIHWVRQAPGQGLEWMGIINPISVSTSYAQKFQGRV
TMTRDTSTSTVFMELSSLRSEDTAVYYCARGGIQLYLHFDYWGQGTLVTVSS
SEQ ID NO: 498
14063_HC [hu anti-<huCDH19> 20D3.1 (1-469)(W133Y) VH]
QVQLVQSGAEVKKPGASVKVSCKVSGYTFTSYFIHWVRQAPGQGLEWMGIINPISVSTSYAQKFQGRV
TMTRDTSTSTVFMELSSLRSEDTAVYYCARGGIQLYLHFDYWGQGTLVTVSS
SEQ ID NO: 499
14064_HC [hu anti-<huCDH19> 20D3.1 (1-469)(W133Y) VH]
QVQLVQSGAEVKKPGASVKVSCKVSGYTFTSYFIHWVRQAPGQGLEWMGIINPISVSTSYAQKFQGRV
TMTRDTSTSTVFMELSSLRSEDTAVYYCARGGIQLYLHFDYWGQGTLVTVSS
SEQ ID NO: 500
14065_HC [hu anti-<huCDH19> 22G10.1 (1-470)(S82R,A99E) VH]
EVQLLESGGGLVQPGGSLRLSCAASGFTFSSYAMNWVRQAPGKGLEWVSTISGGGANTYYADSVKGR
FTISRDNSKSTLYLQMNSLRAEDTAVYHCAKGGMGGYYYGMDVWGQGTTVTVSS
SEQ ID NO: 501
14066_HC [hu anti-<huCDH19> 22G10.1 (1-470)(A99E,H105Y) VH]
EVQLLESGGGLVQPGGSLRLSCAASGFTFSSYAMNWVRQAPGKGLEWVSTISGGGANTYYADSVKGR
FTISSDNSKSTLYLQMNSLRAEDTAVYYCAKGGMGGYYYGMDVWGQGTTVTVSS
SEQ ID NO: 502
14067_HC [hu anti-<huCDH19> 22G10.1 (1-470)(A99E) VH]
EVQLLESGGGLVQPGGSLRLSCAASGFTFSSYAMNWVRQAPGKGLEWVSTISGGGANTYYADSVKGR
FTISSDNSKSTLYLQMNSLRAEDTAVYHCAKGGMGGYYYGMDVWGQGTTVTVSS
SEQ ID NO: 503
14068_HC [hu anti-<huCDH19> 22G10.1 (1-470)(A99E) VH]
EVQLLESGGGLVQPGGSLRLSCAASGFTFSSYAMNWVRQAPGKGLEWVSTISGGGANTYYADSVKGR
FTISSDNSKSTLYLQMNSLRAEDTAVYHCAKGGMGGYYYGMDVWGQGTTVTVSS
SEQ ID NO: 504
14069_HC [hu anti-<huCDH19> 22G10.1 (1-470)(D72E,A99E) VH]
EVQLLESGGGLVQPGGSLRLSCAASGFTFSSYAMNWVRQAPGKGLEWVSTISGGGANTYYAESVKGRF
TISSDNSKSTLYLQMNSLRAEDTAVYHCAKGGMGGYYYGMDVWGQGTTVTVSS
SEQ ID NO: 505
14070_HC [hu anti-<huCDH19> 22G10.1 (1-470)(H105Y) VH]
EVQLLESGGGLVQPGGSLRLSCAASGFTFSSYAMNWVRQAPGKGLEWVSTISGGGANTYYADSVKGR
FTISSDNSKSTLYLQMNSLRAADTAVYYCAKGGMGGYYYGMDVWGQGTTVTVSS
SEQ ID NO: 506
14071_HC [hu anti-<huCDH19> 16A4.1 (1-474)(T144L) VH]
QVQLQESGPGLAKPSETLSLTCTVSGDSITSYYWSWIRQPPGKGLEWIGYIYYSGSTNYNPSLKSRVTISV
DTSKNQFSLKLSSVTAADTAVYYCARDQRRIAAAGTHFYGMDVWGQGTLVTVSS
SEQ ID NO: 507
14072_HC [hu anti-<huCDH19> 19B5.1 VH]
QVQLVQSGAEVKKPGASVKVSCKVSGYTFTSYFIHWVRQAPGQGLEWMGIINPISVSTSYAQKFQGRV
TMTRDTSTSTVFMELSSLRSEDTAVYYCARGGIQLWLHLDYWGQGTLVTVSS
SEQ ID NO: 508
14073_HC [hu anti-<huCDH19> 19B5.1 (1-469)(W133Y) VH]
QVQLVQSGAEVKKPGASVKVSCKVSGYTFTSYFIHWVRQAPGQGLEWMGIINPISVSTSYAQKFQGRV
TMTRDTSTSTVFMELSSLRSEDTAVYYCARGGIQLYLHLDYWGQGTLVTVSS
SEQ ID NO: 509
14074_HC [hu anti-<huCDH19> 19B5.1 VH]
QVQLVQSGAEVKKPGASVKVSCKVSGYTFTSYFIHWVRQAPGQGLEWMGIINPISVSTSYAQKFQGRV
TMTRDTSTSTVFMELSSLRSEDTAVYYCARGGIQLWLHLDYWGQGTLVTVSS
SEQ ID NO: 510
14075_HC [hu anti-<huCDH19> 19B5.1 VH]
QVQLVQSGAEVKKPGASVKVSCKVSGYTFTSYFIHWVRQAPGQGLEWMGIINPISVSTSYAQKFQGRV
TMTRDTSTSTVFMELSSLRSEDTAVYYCARGGIQLWLHLDYWGQGTLVTVSS
SEQ ID NO: 511
14076_HC [hu anti-<huCDH19> 19B5.1 (1-469)(W133Y) VH]
QVQLVQSGAEVKKPGASVKVSCKVSGYTFTSYFIHWVRQAPGQGLEWMGIINPISVSTSYAQKFQGRV
TMTRDTSTSTVFMELSSLRSEDTAVYYCARGGIQLYLHLDYWGQGTLVTVSS
SEQ ID NO: 512
14077_HC [hu anti-<huCDH19> 23A10.3 (1-474)(L92Q) VH]
QVQLVESGGGVVQPGRSLRLSCAASGFTFSRYGIHWVRQAPGKGLEWVAVIWYDGSNKYYADSVKGR
FTISRDNSKNTLYLQMNSLRAEDSAVYYCARRAGIPGTTGYYYGMDVWGQGTTVTVSS
SEQ ID NO: 513
14078_HC [hu anti-<huCDH19> 23A10.3 (1-474)(R17G,L92Q) VH]
QVQLVESGGGVVQPGGSLRLSCAASGFTFSRYGIHWVRQAPGKGLEWVAVIWYDGSNKYYADSVKG
RFTISRDNSKNTLYLQMNSLRAEDSAVYYCARRAGIPGTTGYYYGMDVWGQGTTVTVSS
SEQ ID NO: 514
14079_HC [hu anti-<huCDH19> 23A10.3 (1-474)(R17G,D61E,D72E,L92Q) VH]
QVQLVESGGGVVQPGGSLRLSCAASGFTFSRYGIHWVRQAPGKGLEWVAVIWYEGSNKYYAESVKGR
FTISRDNSKNTLYLQMNSLRAEDSAVYYCARRAGIPGTTGYYYGMDVWGQGTTVTVSS
SEQ ID NO: 515
14080_HC [hu anti-<huCDH19> 23A10.3 VH]
QVQLVESGGGVVQPGRSLRLSCAASGFTFSRYGIHWVRQAPGKGLEWVAVIWYDGSNKYYADSVKGR
FTISRDNSKNTLYLLMNSLRAEDSAVYYCARRAGIPGTTGYYYGMDVWGQGTTVTVSS
SEQ ID NO: 516
14081_HC [hu anti-<huCDH19> 25G10.1 VH]
QVQLQESGPGLVKPSETLSLTCTVSGGSISGYYWSWIRQPPGKGLEWIGYIYYIGSTNYNPSLKSRVTMS
VDTSKNQFSLKLSSVTAADTAVYYCARDGSSGWYRWFDPWGQGTLVTVSS
SEQ ID NO: 517
14082_HC [hu anti-<huCDH19> 25G10.1 (1-469)(D109E,W132Y,W135Y) VH]
QVQLQESGPGLVKPSETLSLTCTVSGGSISGYYWSWIRQPPGKGLEWIGYIYYIGSTNYNPSLKSRVTMS
VDTSKNQFSLKLSSVTAADTAVYYCAREGSSGYYRYFDPWGQGTLVTVSS
SEQ ID NO: 518
14083_HC [hu anti-<huCDH19> 26D1.1 VH]
QVQLVQSGAEVKKPGASVKVSCKASRYTFTSYYMSWVRQAPGQGLEWMGIIHPSGGDTTYAQKFQGR
VTMTGDTSTSTVYMELSSLRSEDTAVYYCARGGIKLWLHFDYWGQGTLVTVSS
SEQ ID NO: 519
14084_HC [hu anti-<huCDH19> 26D1.1 VH]
QVQLVQSGAEVKKPGASVKVSCKASRYTFTSYYMSWVRQAPGQGLEWMGIIHPSGGDTTYAQKFQGR
VTMTGDTSTSTVYMELSSLRSEDTAVYYCARGGIKLWLHFDYWGQGTLVTVSS
SEQ ID NO: 520
14085_HC [hu anti-<huCDH19> 26D1.1 VH]
QVQLVQSGAEVKKPGASVKVSCKASRYTFTSYYMSWVRQAPGQGLEWMGIIHPSGGDTTYAQKFQGR
VTMTGDTSTSTVYMELSSLRSEDTAVYYCARGGIKLWLHFDYWGQGTLVTVSS
SEQ ID NO: 521
14086_HC [hu anti-<huCDH19> 26D1.1 VH]
QVQLVQSGAEVKKPGASVKVSCKASRYTFTSYYMSWVRQAPGQGLEWMGIIHPSGGDTTYAQKFQGR
VTMTGDTSTSTVYMELSSLRSEDTAVYYCARGGIKLWLHFDYWGQGTLVTVSS
SEQ ID NO: 522
14087_HC [hu anti-<huCDH19> 26D1.1 (1-469)(W133Y) VH]
QVQLVQSGAEVKKPGASVKVSCKASRYTFTSYYMSWVRQAPGQGLEWMGIIHPSGGDTTYAQKFQGR
VTMTGDTSTSTVYMELSSLRSEDTAVYYCARGGIKLYLHFDYWGQGTLVTVSS
SEQ ID NO: 523
14088_HC [hu anti-<huCDH19> 26D1.1 (1-469)(R27G,G82R) VH]
QVQLVQSGAEVKKPGASVKVSCKASGYTFTSYYMSWVRQAPGQGLEWMGIIHPSGGDTTYAQKFQGR
VTMTRDTSTSTVYMELSSLRSEDTAVYYCARGGIKLWLHFDYWGQGTLVTVSS
SEQ ID NO: 524
14089_HC [hu anti-<huCDH19> 26F12.1 VH]
QVQLVQSGAEVKKPGASVKVSCKASRYTFTNYYMSWVRQAPGQGLEWMGIINPSGGDSTYAQKFQG
RLTMTGDTSTSTVYMELSSLRSEDTAVYYCARGGIQLWLHFDYWGQGTLVTVSS
SEQ ID NO: 525
14090_HC [hu anti-<huCDH19> 26F12.1 VH]
QVQLVQSGAEVKKPGASVKVSCKASRYTFTNYYMSWVRQAPGQGLEWMGIINPSGGDSTYAQKFQG
RLTMTGDTSTSTVYMELSSLRSEDTAVYYCARGGIQLWLHFDYWGQGTLVTVSS
SEQ ID NO: 526
14091_HC [hu anti-<huCDH19> 26F12.1 (1-469)(W133Y) VH]
QVQLVQSGAEVKKPGASVKVSCKASRYTFTNYYMSWVRQAPGQGLEWMGIINPSGGDSTYAQKFQG
RLTMTGDTSTSTVYMELSSLRSEDTAVYYCARGGIQLYLHFDYWGQGTLVTVSS
SEQ ID NO: 527
14092_HC [hu anti-<huCDH19> 26F12.1 (1-469)(W133Y) VH]
QVQLVQSGAEVKKPGASVKVSCKASRYTFTNYYMSWVRQAPGQGLEWMGIINPSGGDSTYAQKFQG
RLTMTGDTSTSTVYMELSSLRSEDTAVYYCARGGIQLYLHFDYWGQGTLVTVSS
SEQ ID NO: 528
14093_HC [hu anti-<huCDH19> 25F8.1 VH]
QVQLVQSGAEVKKPGASVKVSCKASGYTFTSYYIHWVRQAPGQGLEWMGIINPSGGSTRYAQKFQGR
VTMTRDTSTSTVFMELSSLRSEDTAVYYCARGGIQLWLHFDYWGQGTLVTVSS
SEQ ID NO: 529
14094_HC [hu anti-<huCDH19> 25F8.1 VH]
QVQLVQSGAEVKKPGASVKVSCKASGYTFTSYYIHWVRQAPGQGLEWMGIINPSGGSTRYAQKFQGR
VTMTRDTSTSTVFMELSSLRSEDTAVYYCARGGIQLWLHFDYWGQGTLVTVSS
SEQ ID NO: 530
14095_HC [hu anti-<huCDH19> 25F8.1 (1-469)(F90Y) VH]
QVQLVQSGAEVKKPGASVKVSCKASGYTFTSYYIHWVRQAPGQGLEWMGIINPSGGSTRYAQKFQGR
VTMTRDTSTSTVYMELSSLRSEDTAVYYCARGGIQLWLHFDYWGQGTLVTVSS
SEQ ID NO: 531
14096_HC [hu anti-<huCDH19> 25F8.1 (1-469)(F90Y) VH]
QVQLVQSGAEVKKPGASVKVSCKASGYTFTSYYIHWVRQAPGQGLEWMGIINPSGGSTRYAQKFQGR
VTMTRDTSTSTVYMELSSLRSEDTAVYYCARGGIQLWLHFDYWGQGTLVTVSS
SEQ ID NO: 532
14097_HC [hu anti-<huCDH19> 25F8.1 (1-469)(F90Y,W133Y) VH]
QVQLVQSGAEVKKPGASVKVSCKASGYTFTSYYIHWVRQAPGQGLEWMGIINPSGGSTRYAQKFQGR
VTMTRDTSTSTVYMELSSLRSEDTAVYYCARGGIQLYLHFDYWGQGTLVTVSS
SEQ ID NO: 533
14098_HC [hu anti-<huCDH19> 22D1.1 VH]
QVQLVQSGAEVKKPGASVRVSCKVSGYTFTSYFIHWVRQAPGQGLEWMGIINPISVSTSYAQKFQGRV
TMTRDTSTSTVFMELSSLRSEDTAVYYCARGGIQLWLHLDYWGQGTLVTVSS
SEQ ID NO: 534
14099_HC [hu anti-<huCDH19> 22D1.1 VH]
QVQLVQSGAEVKKPGASVRVSCKVSGYTFTSYFIHWVRQAPGQGLEWMGIINPISVSTSYAQKFQGRV
TMTRDTSTSTVFMELSSLRSEDTAVYYCARGGIQLWLHLDYWGQGTLVTVSS
SEQ ID NO: 535
14100_HC [hu anti-<huCDH19> 22D1.1 (1-469)(W133Y) VH]
QVQLVQSGAEVKKPGASVRVSCKVSGYTFTSYFIHWVRQAPGQGLEWMGIINPISVSTSYAQKFQGRV
TMTRDTSTSTVFMELSSLRSEDTAVYYCARGGIQLYLHLDYWGQGTLVTVSS
SEQ ID NO: 536
14101_HC [hu anti-<huCDH19> 22D1.1 (1-469)(W133Y) VH]
QVQLVQSGAEVKKPGASVRVSCKVSGYTFTSYFIHWVRQAPGQGLEWMGIINPISVSTSYAQKFQGRV
TMTRDTSTSTVFMELSSLRSEDTAVYYCARGGIQLYLHLDYWGQGTLVTVSS
SEQ ID NO: 537
14102_HC [hu anti-<huCDH19> 22D1.1 (1-469)(F90Y) VH]
QVQLVQSGAEVKKPGASVRVSCKVSGYTFTSYFIHWVRQAPGQGLEWMGIINPISVSTSYAQKFQGRV
TMTRDTSTSTVYMELSSLRSEDTAVYYCARGGIQLWLHLDYWGQGTLVTVSS
SEQ ID NO: 538
13591_HC [hu anti-<huCDH19> 4F7 VH]
QVQLQESGPGLVKPSETLSLTCTVSGGSISSYSWSWIRQPPGKGLEWIGYIYYSGSTNYNPSLKSRVTISL
DTSKNQFSLKLSSVTAADTAVYYCARNWAFHFDYWGQGTLVTVSS
SEQ ID NO: 539
14301_HC [hu anti-<huCDH19> 2G6 VH]
QVQLVESGGGVVQPGRSLRLSCAASGFTFSSYGMHWVRQAPGKGLEWVAFIWYDGSNKYYADSVKD
RFTISRDNSKNTLYLQMKSLRAEDTAVYYCARRAGIIGTIGYYYGMDVWGQGTTVTVSS
SEQ ID NO: 540
14302_HC [hu anti-<huCDH19> 2G6 (1-477)(R17G,K94N) VH]
QVQLVESGGGVVQPGGSLRLSCAASGFTFSSYGMHWVRQAPGKGLEWVAFIWYDGSNKYYADSVKD
RFTISRDNSKNTLYLQMNSLRAEDTAVYYCARRAGIIGTIGYYYGMDVWGQGTTVTVSS
SEQ ID NO: 541
14303_HC [hu anti-<huCDH19> 2G6 (1-477)(D61E,D72E) VH]
QVQLVESGGGVVQPGRSLRLSCAASGFTFSSYGMHWVRQAPGKGLEWVAFIWYEGSNKYYAESVKD
RFTISRDNSKNTLYLQMKSLRAEDTAVYYCARRAGIIGTIGYYYGMDVWGQGTTVTVSS
SEQ ID NO: 542
14304_HC [hu anti-<huCDH19> 2G6 (1-477)(R17G) VH]
QVQLVESGGGVVQPGGSLRLSCAASGFTFSSYGMHWVRQAPGKGLEWVAFIWYDGSNKYYADSVKD
RFTISRDNSKNTLYLQMKSLRAEDTAVYYCARRAGIIGTIGYYYGMDVWGQGTTVTVSS
SEQ ID NO: 543

TABLE IId
Light Chain Variable Region Amino acid Sequences

13586_LC [hu anti-<huCDH19> 4F3 VL]
EIVLTQSPGTLSLSPGERATLSCRASQSVSSSYLAWYQQKPGQAPRLLIYGASSRATGIPDRFSGSGSGTD
FTLTISRLEPEDFAVYYCQQYGSSWTFGQGTKVEIKR
SEQ ID NO: 544
13589_LC [hu anti-<huCDH19> 4A9 VL]
QSVLTQPPSVSGAPGQRVTISCTGSSSNIGTGYAVHWYQQFPGTAPKLLIYGNNNRPSGVPDRFSGSKSG
TSASLAITGLQAEDEADYYCQSYDSRLSGWVFGGGTKLTVLG
SEQ ID NO: 545
13590_LC [hu anti-<huCDH19> 4B10 VL]
EIVLTQSPGTLSLSPGERATLSCRASQSVSNTYLAWYHQRPGQAPRLLIYGASSRATGIPDRFSGSGSGTD
FALTISSLEPEDFAVYYCQQYSNSWTFGQGTKVEIKR
SEQ ID NO: 546
13874_LC [hu anti-<huCDH19> 17H8.2 VL]
DIVLTQSPGTLSLSPGERATLSCRASQSVAGSYLAWYQQKPGQAPRLLISGASSRATGIPDRFSGSGSGT
DFTLTISRLEPEDFAVYYCQQYGKSPITFGQGTRLEMKG
SEQ ID NO: 547
13875_LC [hu anti-<huCDH19> 16C1.1 VL]
EIVLTQSPGTLSLSPGERATLSCRASQSVSSSYLAWYQQKPGQAPRLLIFGASSRATGIPDRFSGSGSGTD
FTLTISGLEPEDFAVYHCQQYGNSPLTFGGGTKVEIKR
SEQ ID NO: 548
13876_LC [hu anti-<huCDH19> 16A4.1 VL]
EIVLTQSPGTLSLSPGERATLSCRASQSVSSSYLAWYQQKPGQAPRLLIYGTSSRATGIPDRFSGSGSGTD
FTLTISRLEPEDFAVYYCQQYGSSPFTFGGGTKVEIKR
SEQ ID NO: 549
13877_LC [hu anti-<huCDH19> 22G10.1 VL]
EIVMTQSPVTLSLSLGERATLSCRASQSISSNLAWFQQKPGQAPRLLIYGAFTRATGIPARVSGSGSGTEF
TLTISSLQSEDFAVYYCQQYNYWPLTFGGGTKVEIKR
SEQ ID NO: 552
13878_LC [hu anti-<huCDH19> 20D3.1 VL]
QSALTQPPSATGTPGQRVTISCSGSSSNIGSNFVNWYKQLPGTAPKVLIYTNNQRPSGVPDRFSGSKSGTS
ASLAISGLQSEDESDYYCATWDDSLNGWVFGGGTKLTVLG
SEQ ID NO: 554
13879_LC [hu anti-<huCDH19> 22D1.1 VL]
QSALTQPPSATGTPGQRVTISCSGSSSNIGSNFVNWYKQLPGTAPKVLIYTNNQRPSGVPDRFSGSKSGTS
ASLAISGLQSEDESDYYCATWDDSMNGWVFGGGTKLTVLG
SEQ ID NO: 555
13880_LC [hu anti-<huCDH19> 25F8.1 VL]
QSALTQPPSATGTPGQRVTISCSGSSSNIGRNFVNWYKQLPGTAPKVLIYTNNQRPSGVPDRFSGSKSGT
SASLAISGLQSEDESDYYCAAWDDSLNGWVFGGGTKLTVLG
SEQ ID NO: 556
13881_LC [hu anti-<huCDH19> 26F12.1 VL]
QSVLTQSPSASGTPGQKVTISCSGSRSNIGSNFVNWYQQLPGTAPKLLIYTNYQRPSGVPDRFSGSKSGTS
ASLAISGLQSEDEADYYCAVWDDSLNGWVFGGGTKLTVLG
SEQ ID NO: 557
13882_LC [hu anti-<huCDH19> 26D1.1 VL]
HSVLTQSPSASGTPGQRVTISCSGSRSNIGSNFVNWYQQLPGTAPKLLIYTNNQRPSGVPDRFSGSKSGTS
ASLAISGLQSEDEADYYCAVWDDSLNGWVFGGGTKLTVLG
SEQ ID NO: 555
13883_LC [hu anti-<huCDH19> 25G10.1 VL]
EIVLTQSPGTLSLSPGERATLSCRASQSVSSSYLAWYQQKPGQAPRLLIFGASSRATGIPDRFSGSGSGTD
FTLTISRLEPEDFAVYHCQQYGNSPLTFGGGTKVEIKR
SEQ ID NO: 556
13885_LC [hu anti-<huCDH19> 19B5.1 VL]
QSALTQPPSTTGTPGQRVTISCSGSRSNIGSNFVNWYKQLPGTAPKVLIYTNNQRPSGVPDRFSGSKSGTS
ASLAISGLQSEDESDYYCATWDDSMNGWVFGGGTKLTVLG
SEQ ID NO: 557
14022_LC [hu anti-<huCDH19> 4A2 (1-236)(N30Q) VL]
EIVLTQSPGTLSLSPGERATLSCRASRQISSSYLAWYQQKPGQAPRLLIYGPSSRATGIPDRFSGSGSGTDF
TLTISRLEPEDFTVYYCQQYGSSFTFGPGTKVDIKR
SEQ ID NO: 558
14024_LC [hu anti-<huCDH19> 4A2 (1-236)(N30Q,T102A,P141Q) VL]
EIVLTQSPGTLSLSPGERATLSCRASRQISSSYLAWYQQKPGQAPRLLIYGPSSRATGIPDRFSGSGSGTDF
TLTISRLEPEDFAVYYCQQYGSSFTFGQGTKVDIKR
SEQ ID NO: 559
14025_LC [hu anti-<huCDH19> 4A2 (1-236)(N30Q,T102A) VL]
EIVLTQSPGTLSLSPGERATLSCRASRQISSSYLAWYQQKPGQAPRLLIYGPSSRATGIPDRFSGSGSGTDF
TLTISRLEPEDFAVYYCQQYGSSFTFGPGTKVDIKR
SEQ ID NO: 560
14026_LC [hu anti-<huCDH19> 4A2 (1-236)(N30Q,T102A) VL]
EIVLTQSPGTLSLSPGERATLSCRASRQISSSYLAWYQQKPGQAPRLLIYGPSSRATGIPDRFSGSGSGTDF
TLTISRLEPEDFAVYYCQQYGSSFTFGPGTKVDIKR
SEQ ID NO: 561
14027_LC [hu anti-<huCDH19> 4A2 (1-236)(N30Q,T102A,P141Q) VL]
EIVLTQSPGTLSLSPGERATLSCRASRQISSSYLAWYQQKPGQAPRLLIYGPSSRATGIPDRFSGSGSGTDF
TLTISRLEPEDFAVYYCQQYGSSFTFGQGTKVDIKR
SEQ ID NO: 562
14028_LC [hu anti-<huCDH19> 4A2 (1-236)(N30Q,T102A,P141Q) VL]
EIVLTQSPGTLSLSPGERATLSCRASRQISSSYLAWYQQKPGQAPRLLIYGPSSRATGIPDRFSGSGSGTDF
TLTISRLEPEDFAVYYCQQYGSSFTFGQGTKVDIKR
SEQ ID NO: 563
14029_LC [hu anti-<huCDH19> 4A2 (1-236)(R29Q,N30S) VL]
EIVLTQSPGTLSLSPGERATLSCRASQSISSSYLAWYQQKPGQAPRLLIYGPSSRATGIPDRFSGSGSGTDF
TLTISRLEPEDFTVYYCQQYGSSFTFGPGTKVDIKR
SEQ ID NO: 564
14030_LC [hu anti-<huCDH19> 4F3 VL]
EIVLTQSPGTLSLSPGERATLSCRASQSVSSSYLAWYQQKPGQAPRLLIYGASSRATGIPDRFSGSGSGTD
FTLTISRLEPEDFAVYYCQQYGSSWTFGQGTKVEIKR
SEQ ID NO: 565
14031_LC [hu anti-<huCDH19> 4F3 VL]
EIVLTQSPGTLSLSPGERATLSCRASQSVSSSYLAWYQQKPGQAPRLLIYGASSRATGIPDRFSGSGSGTD
FTLTISRLEPEDFAVYYCQQYGSSWTFGQGTKVEIKR
SEQ ID NO: 566
14032_LC [hu anti-<huCDH19> 4F3 VL]
EIVLTQSPGTLSLSPGERATLSCRASQSVSSSYLAWYQQKPGQAPRLLIYGASSRATGIPDRFSGSGSGTD
FTLTISRLEPEDFAVYYCQQYGSSWTFGQGTKVEIKR
SEQ ID NO: 567
14033_LC [hu anti-<huCDH19> 4F3 VL]
EIVLTQSPGTLSLSPGERATLSCRASQSVSSSYLAWYQQKPGQAPRLLIYGASSRATGIPDRFSGSGSGTD
FTLTISRLEPEDFAVYYCQQYGSSWTFGQGTKVEIKR
SEQ ID NO: 568
14034_LC [hu anti-<huCDH19> 4F3 VL]
EIVLTQSPGTLSLSPGERATLSCRASQSVSSSYLAWYQQKPGQAPRLLIYGASSRATGIPDRFSGSGSGTD
FTLTISRLEPEDFAVYYCQQYGSSWTFGQGTKVEIKR
SEQ ID NO: 569
14039_LC [hu anti-<huCDH19> 2G6 (1-234)(C42S,D110E) VL]
SYELTQPPSVSVSPGQTASITCSGDRLGEKYTSWYQQRPGQSPLLVIYQDTKRPSGIPERFSGSNSGNTAT
LTISGTQAMDEADYYCQAWESSTVVFGGGTKLTVLG
SEQ ID NO: 570
14040_LC [hu anti-<huCDH19> 16C1.1 (1-235)(H105Y) VL]
EIVLTQSPGTLSLSPGERATLSCRASQSVSSSYLAWYQQKPGQAPRLLIFGASSRATGIPDRFSGSGSGTD
FTLTISGLEPEDFAVYYCQQYGNSPLTFGGGTKVEIKR
SEQ ID NO: 571
14041_LC [hu anti-<huCDH19> 16C1.1 (1-235)(H105Y) VL]
EIVLTQSPGTLSLSPGERATLSCRASQSVSSSYLAWYQQKPGQAPRLLIFGASSRATGIPDRFSGSGSGTD
FTLTISGLEPEDFAVYYCQQYGNSPLTFGGGTKVEIKR
SEQ ID NO: 572
14042_LC [hu anti-<huCDH19> 16C1.1 (1-235)(H105Y) VL]
EIVLTQSPGTLSLSPGERATLSCRASQSVSSSYLAWYQQKPGQAPRLLIFGASSRATGIPDRFSGSGSGTD
FTLTISGLEPEDFAVYYCQQYGNSPLTFGGGTKVEIKR
SEQ ID NO: 573
14043_LC [hu anti-<huCDH19> 16C1.1 (1-235)(H105Y) VL]
EIVLTQSPGTLSLSPGERATLSCRASQSVSSSYLAWYQQKPGQAPRLLIFGASSRATGIPDRFSGSGSGTD
FTLTISGLEPEDFAVYYCQQYGNSPLTFGGGTKVEIKR
SEQ ID NO: 574
14044_LC [hu anti-<huCDH19> 16C1.1 (1-235)(G95R,H105Y,G141Q) VL]
EIVLTQSPGTLSLSPGERATLSCRASQSVSSSYLAWYQQKPGQAPRLLIFGASSRATGIPDRFSGSGSGTD
FTLTISRLEPEDFAVYYCQQYGNSPLTFGQGTKVEIKR
SEQ ID NO: 575
14045_LC [hu anti-<huCDH19> 17H8.2 (1-235)(G149R) VL]
DIVLTQSPGTLSLSPGERATLSCRASQSVAGSYLAWYQQKPGQAPRLLISGASSRATGIPDRFSGSGSGT
DFTLTISRLEPEDFAVYYCQQYGKSPITFGQGTRLEMKR
SEQ ID NO: 576
14046_LC [hu anti-<huCDH19> 17H8.2 (1-235)(G149R) VL]
DIVLTQSPGTLSLSPGERATLSCRASQSVAGSYLAWYQQKPGQAPRLLISGASSRATGIPDRFSGSGSGT
DFTLTISRLEPEDFAVYYCQQYGKSPITFGQGTRLEMKR
SEQ ID NO: 577
14047_LC [hu anti-<huCDH19> 17H8.2 (1-235)(G149R) VL]
DIVLTQSPGTLSLSPGERATLSCRASQSVAGSYLAWYQQKPGQAPRLLISGASSRATGIPDRFSGSGSGT
DFTLTISRLEPEDFAVYYCQQYGKSPITFGQGTRLEMKR
SEQ ID NO: 578
14048_LC [hu anti-<huCDH19> 17H8.2 (1-235)(S57Y,G149R) VL]
DIVLTQSPGTLSLSPGERATLSCRASQSVAGSYLAWYQQKPGQAPRLLIYGASSRATGIPDRFSGSGSGT
DFTLTISRLEPEDFAVYYCQQYGKSPITFGQGTRLEMKR
SEQ ID NO: 579
14049_LC [hu anti-<huCDH19> 4F7 (1-239)(H57Y) VL]
QSVLTQPPSVSGAPGQRVTISCTGSSSNIGTGYDVHWYQQLPGTAPKLLIYGNSNRPSGVPDRFSGSKSG
TSASLAITGLQAEDEADYYCQSYDSSLSGWVFGGGTRLTVLG
SEQ ID NO: 580
14050_LC [hu anti-<huCDH19> 4F7 (1-239)(H57Y,D110E) VL]
QSVLTQPPSVSGAPGQRVTISCTGSSSNIGTGYDVHWYQQLPGTAPKLLIYGNSNRPSGVPDRFSGSKSG
TSASLAITGLQAEDEADYYCQSYESSLSGWVFGGGTRLTVLG
SEQ ID NO: 581
14051_LC [hu anti-<huCDH19> 4F7 (1-239)(D110E) VL]
QSVLTQPPSVSGAPGQRVTISCTGSSSNIGTGYDVHWYQQLPGTAPKLLIHGNSNRPSGVPDRFSGSKSG
TSASLAITGLQAEDEADYYCQSYESSLSGWVFGGGTRLTVLG
SEQ ID NO: 582
14052_LC [hu anti-<huCDH19> 4B10 (1-236)(H45Q,A90T) VL]
EIVLTQSPGTLSLSPGERATLSCRASQSVSNTYLAWYQQRPGQAPRLLIYGASSRATGIPDRFSGSGSGTD
FTLTISSLEPEDFAVYYCQQYSNSWTFGQGTKVEIKR
SEQ ID NO: 583
14053_LC [hu anti-<huCDH19> 4B10 (1-236)(H45Q,A90T) VL]
EIVLTQSPGTLSLSPGERATLSCRASQSVSNTYLAWYQQRPGQAPRLLIYGASSRATGIPDRFSGSGSGTD
FTLTISSLEPEDFAVYYCQQYSNSWTFGQGTKVEIKR
SEQ ID NO: 584
14054_LC [hu anti-<huCDH19> 4B10 (1-236)(H45Q,A90T) VL]
EIVLTQSPGTLSLSPGERATLSCRASQSVSNTYLAWYQQRPGQAPRLLIYGASSRATGIPDRFSGSGSGTD
FTLTISSLEPEDFAVYYCQQYSNSWTFGQGTKVEIKR
SEQ ID NO: 585
14055_LC [hu anti-<huCDH19> 4B10 (1-236)(H45Q,A90T) VL]
EIVLTQSPGTLSLSPGERATLSCRASQSVSNTYLAWYQQRPGQAPRLLIYGASSRATGIPDRFSGSGSGTD
FTLTISSLEPEDFAVYYCQQYSNSWTFGQGTKVEIKR
SEQ ID NO: 586
14056_LC [hu anti-<huCDH19> 4A9 (1-239)(F47L) VL]
QSVLTQPPSVSGAPGQRVTISCTGSSSNIGTGYAVHWYQQLPGTAPKLLIYGNNNRPSGVPDRFSGSKSG
TSASLAITGLQAEDEADYYCQSYDSRLSGWVFGGGTKLTVLG
SEQ ID NO: 587
14057_LC [hu anti-<huCDH19> 4A9 (1-239)(F47L) VL]
QSVLTQPPSVSGAPGQRVTISCTGSSSNIGTGYAVHWYQQLPGTAPKLLIYGNNNRPSGVPDRFSGSKSG
TSASLAITGLQAEDEADYYCQSYDSRLSGWVFGGGTKLTVLG
SEQ ID NO: 588
14058_LC [hu anti-<huCDH19> 4A9 (1-239)(F47L,D110E) VL]
QSVLTQPPSVSGAPGQRVTISCTGSSSNIGTGYAVHWYQQLPGTAPKLLIYGNNNRPSGVPDRFSGSKSG
TSASLAITGLQAEDEADYYCQSYESRLSGWVFGGGTKLTVLG
SEQ ID NO: 589
14059_LC [hu anti-<huCDH19> 4A9 (1-239)(F47L,D110E) VL]
QSVLTQPPSVSGAPGQRVTISCTGSSSNIGTGYAVHWYQQLPGTAPKLLIYGNNNRPSGVPDRFSGSKSG
TSASLAITGLQAEDEADYYCQSYESRLSGWVFGGGTKLTVLG
SEQ ID NO: 590
14060_LC [hu anti-<huCDH19> 20D3.1 (1-235)(S102A) VL]
QSALTQPPSATGTPGQRVTISCSGSSSNIGSNFVNWYKQLPGTAPKVLIYTNNQRPSGVPDRFSGSKSGTS
ASLAISGLQSEDEADYYCATWDDSLNGWVFGGGTKLTVLG
SEQ ID NO: 591
14061_LC [hu anti-<huCDH19> 20D3.1 (1-235)(K45Q,S102A) VL]
QSALTQPPSATGTPGQRVTISCSGSSSNIGSNFVNWYQQLPGTAPKVLIYTNNQRPSGVPDRFSGSKSGTS
ASLAISGLQSEDEADYYCATWDDSLNGWVFGGGTKLTVLG
SEQ ID NO: 592
14062_LC [hu anti-<huCDH19> 20D3.1 (1-235)(K45Q,S102A) VL]
QSALTQPPSATGTPGQRVTISCSGSSSNIGSNFVNWYQQLPGTAPKVLIYTNNQRPSGVPDRFSGSKSGTS
ASLAISGLQSEDEADYYCATWDDSLNGWVFGGGTKLTVLG
SEQ ID NO: 593
14063_LC [hu anti-<huCDH19> 20D3.1 (1-235)(K45Q,S102A,D111E,N135Q) VL]
QSALTQPPSATGTPGQRVTISCSGSSSNIGSNFVNWYQQLPGTAPKVLIYTNNQRPSGVPDRFSGSKSGTS
ASLAISGLQSEDEADYYCATWDESLQGWVFGGGTKLTVLG
SEQ ID NO: 594
14064_LC [hu anti-<huCDH19> 20D3.1 (1-235)(W109Y) VL]
QSALTQPPSATGTPGQRVTISCSGSSSNIGSNFVNWYKQLPGTAPKVLIYTNNQRPSGVPDRFSGSKSGTS
ASLAISGLQSEDESDYYCATYDDSLNGWVFGGGTKLTVLG
SEQ ID NO: 595
14065_LC [hu anti-<huCDH19> 22G10.1 VL]
EIVMTQSPVTLSLSLGERATLSCRASQSISSNLAWFQQKPGQAPRLLIYGAFTRATGIPARVSGSGSGTEF
TLTISSLQSEDFAVYYCQQYNYWPLTFGGGTKVEIKR
SEQ ID NO: 596
14066_LC [hu anti-<huCDH19> 22G10.1 VL]
EIVMTQSPVTLSLSLGERATLSCRASQSISSNLAWFQQKPGQAPRLLIYGAFTRATGIPARVSGSGSGTEF
TLTISSLQSEDFAVYYCQQYNYWPLTFGGGTKVEIKR
SEQ ID NO: 597
14067_LC [hu anti-<huCDH19> 22G10.1 (1-234)(Q97E,S98P) VL]
EIVMTQSPVTLSLSLGERATLSCRASQSISSNLAWFQQKPGQAPRLLIYGAFTRATGIPARVSGSGSGTEF
TLTISSLEPEDFAVYYCQQYNYWPLTFGGGTKVEIKR
SEQ ID NO: 598
14068_LC [hu anti-<huCDH19> 22G10.1 (1-234)(V78F,Q97E,S98P) VL]
EIVMTQSPVTLSLSLGERATLSCRASQSISSNLAWFQQKPGQAPRLLIYGAFTRATGIPARFSGSGSGTEF
TLTISSLEPEDFAVYYCQQYNYWPLTFGGGTKVEIKR
SEQ ID NO: 599
14069_LC [hu anti-<huCDH19> 22G10.1 (1-234)(V78F,Q97E,S98P) VL]
EIVMTQSPVTLSLSLGERATLSCRASQSISSNLAWFQQKPGQAPRLLIYGAFTRATGIPARFSGSGSGTEF
TLTISSLEPEDFAVYYCQQYNYWPLTFGGGTKVEIKR
SEQ ID NO: 600
14070_LC [hu anti-<huCDH19> 22G10.1 VL]
EIVMTQSPVTLSLSLGERATLSCRASQSISSNLAWFQQKPGQAPRLLIYGAFTRATGIPARVSGSGSGTEF
TLTISSLQSEDFAVYYCQQYNYWPLTFGGGTKVEIKR
SEQ ID NO: 601
14071_LC [hu anti-<huCDH19> 16A4.1 (1-235)(G141Q) VL]
EIVLTQSPGTLSLSPGERATLSCRASQSVSSSYLAWYQQKPGQAPRLLIYGTSSRATGIPDRFSGSGSGTD
FTLTISRLEPEDFAVYYCQQYGSSPFTFGQGTKVEIKR
SEQ ID NO: 602
14072_LC [hu anti-<huCDH19> 19B5.1 (1-235)(K45Q,S102A) VL]
QSALTQPPSTTGTPGQRVTISCSGSRSNIGSNFVNWYQQLPGTAPKVLIYTNNQRPSGVPDRFSGSKSGTS
ASLAISGLQSEDEADYYCATWDDSMNGWVFGGGTKLTVLG
SEQ ID NO: 603
14073_LC [hu anti-<huCDH19> 19B5.1 (1-235)(K45Q,S102A) VL]
QSALTQPPSTTGTPGQRVTISCSGSRSNIGSNFVNWYQQLPGTAPKVLIYTNNQRPSGVPDRFSGSKSGTS
ASLAISGLQSEDEADYYCATWDDSMNGWVFGGGTKLTVLG
SEQ ID NO: 604
14074_LC [hu anti-<huCDH19> 19B5.1 (1-235)(T11V,K45Q,S102A) VL]
QSALTQPPSVTGTPGQRVTISCSGSRSNIGSNFVNWYQQLPGTAPKVLIYTNNQRPSGVPDRFSGSKSGT
SASLAISGLQSEDEADYYCATWDDSMNGWVFGGGTKLTVLG
SEQ ID NO: 605
14075_LC [hu anti-<huCDH19> 19B5.1 (1-235)(T11V,K45Q,S102A,D111E,N135Q) VL]
QSALTQPPSVTGTPGQRVTISCSGSRSNIGSNFVNWYQQLPGTAPKVLIYTNNQRPSGVPDRFSGSKSGT
SASLAISGLQSEDEADYYCATWDESMQGWVFGGGTKLTVLG
SEQ ID NO: 606
14076_LC [hu anti-<huCDH19> 19B5.1 (1-235)(T11V,K45Q,S102A,W109Y,D111E,N135Q) VL]
QSALTQPPSVTGTPGQRVTISCSGSRSNIGSNFVNWYQQLPGTAPKVLIYTNNQRPSGVPDRFSGSKSGT
SASLAISGLQSEDEADYYCATYDESMQGWVFGGGTKLTVLG
SEQ ID NO: 607
14077_LC [hu anti-<huCDH19> 23A10.3 (1-231)(C42S) VL]
SYELTQPPSVSVSPGQTASITCSGDRLGEKYVSWYQQKPGQSPILVIYQDNKWPSGIPERFSGSNSGNTA
TLTISGTQAMDEADYYCQAWDSSTVVFGGGTKLTVLG
SEQ ID NO: 608
14078_LC [hu anti-<huCDH19> 23A10.3 (1-231)(C42S) VL]
SYELTQPPSVSVSPGQTASITCSGDRLGEKYVSWYQQKPGQSPILVIYQDNKWPSGIPERFSGSNSGNTA
TLTISGTQAMDEADYYCQAWDSSTVVFGGGTKLTVLG
SEQ ID NO: 609
14079_LC [hu anti-<huCDH19> 23A10.3 (1-231)(C42S,D110E) VL]
SYELTQPPSVSVSPGQTASITCSGDRLGEKYVSWYQQKPGQSPILVIYQDNKWPSGIPERFSGSNSGNTA
TLTISGTQAMDEADYYCQAWESSTVVFGGGTKLTVLG
SEQ ID NO: 610
14080_LC [hu anti-<huCDH19> 23A10.3 (1-231)(C42Y) VL]
SYELTQPPSVSVSPGQTASITCSGDRLGEKYVYWYQQKPGQSPILVIYQDNKWPSGIPERFSGSNSGNTA
TLTISGTQAMDEADYYCQAWDSSTVVFGGGTKLTVLG
SEQ ID NO: 611
14081_LC [hu anti-<huCDH19> 25G10.1 (1-235)(H105Y) VL]
EIVLTQSPGTLSLSPGERATLSCRASQSVSSSYLAWYQQKPGQAPRLLIFGASSRATGIPDRFSGSGSGTD
FTLTISRLEPEDFAVYYCQQYGNSPLTFGGGTKVEIKR
SEQ ID NO: 612
14082_LC [hu anti-<huCDH19> 25G10.1 (1-235)(H105Y) VL]
EIVLTQSPGTLSLSPGERATLSCRASQSVSSSYLAWYQQKPGQAPRLLIFGASSRATGIPDRFSGSGSGTD
FTLTISRLEPEDFAVYYCQQYGNSPLTFGGGTKVEIKR
SEQ ID NO: 613
14083_LC [hu anti-<huCDH19> 26D1.1 (1-235)(S7P) VL]
HSVLTQPPSASGTPGQRVTISCSGSRSNIGSNFVNWYQQLPGTAPKLLIYTNNQRPSGVPDRFSGSKSGTS
ASLAISGLQSEDEADYYCAVWDDSLNGWVFGGGTKLTVLG
SEQ ID NO: 614
14084_LC [hu anti-<huCDH19> 26D1.1 (1-235)(H1Q,S7P) VL]
QSVLTQPPSASGTPGQRVTISCSGSRSNIGSNFVNWYQQLPGTAPKWYTNNQRPSGVPDRFSGSKSGTS
ASLAISGLQSEDEADYYCAVWDDSLNGWVFGGGTKLTVLG
SEQ ID NO: 615
14085_LC [hu anti-<huCDH19> 26D1.1 (1-235)(H1Q,S7P,W109Y) VL]
QSVLTQPPSASGTPGQRVTISCSGSRSNIGSNFVNWYQQLPGTAPKWYTNNQRPSGVPDRFSGSKSGTS
ASLAISGLQSEDEADYYCAVYDDSLNGWVFGGGTKLTVLG
SEQ ID NO: 616
14086_LC [hu anti-<huCDH19> 26D1.1 (1-235)(H1Q,S7P,W109Y,D111E,N135Q) VL]
QSVLTQPPSASGTPGQRVTISCSGSRSNIGSNFVNWYQQLPGTAPKWYTNNQRPSGVPDRFSGSKSGTS
ASLAISGLQSEDEADYYCAVYDESLQGWVFGGGTKLTVLG
SEQ ID NO: 617
14087_LC [hu anti-<huCDH19> 26D1.1 (1-235)(H1Q,S7P,W109Y,D111E,N135Q) VL]
QSVLTQPPSASGTPGQRVTISCSGSRSNIGSNFVNWYQQLPGTAPKWYTNNQRPSGVPDRFSGSKSGTS
ASLAISGLQSEDEADYYCAVYDESLQGWVFGGGTKLTVLG
SEQ ID NO: 618
14088_LC [hu anti-<huCDH19> 26D1.1 (1-235)(H1Q,S7P) VL]
QSVLTQPPSASGTPGQRVTISCSGSRSNIGSNFVNWYQQLPGTAPKWYTNNQRPSGVPDRFSGSKSGTS
ASLAISGLQSEDEADYYCAVWDDSLNGWVFGGGTKLTVLG
SEQ ID NO: 619
14089_LC [hu anti-<huCDH19> 26F12.1 (1-235)(S7P) VL]
QSVLTQPPSASGTPGQKVTISCSGSRSNIGSNFVNWYQQLPGTAPKWYTNYQRPSGVPDRFSGSKSGTS
ASLAISGLQSEDEADYYCAVWDDSLNGWVFGGGTKLTVLG
SEQ ID NO: 620
14090_LC [hu anti-<huCDH19> 26F12.1 (1-235)(S7P,D111E) VL]
QSVLTQPPSASGTPGQKVTISCSGSRSNIGSNFVNWYQQLPGTAPKWYTNYQRPSGVPDRFSGSKSGTS
ASLAISGLQSEDEADYYCAVWDESLNGWVFGGGTKLTVLG
SEQ ID NO: 621
14091_LC [hu anti-<huCDH19> 26F12.1 (1-235)(S7P,D111E) VL]
QSVLTQPPSASGTPGQKVTISCSGSRSNIGSNFVNWYQQLPGTAPKWYTNYQRPSGVPDRFSGSKSGTS
ASLAISGLQSEDEADYYCAVWDESLNGWVFGGGTKLTVLG
SEQ ID NO: 622
14092_LC [hu anti-<huCDH19> 26F12.1 (1-235)(S7P,W109Y,D111E,N135Q) VL]
QSVLTQPPSASGTPGQKVTISCSGSRSNIGSNFVNWYQQLPGTAPKWYTNYQRPSGVPDRFSGSKSGTS
ASLAISGLQSEDEADYYCAVYDESLQGWVFGGGTKLTVLG
SEQ ID NO: 623
14093_LC [hu anti-<huCDH19> 25F8.1 (1-235)(K45Q) VL]
QSALTQPPSATGTPGQRVTISCSGSSSNIGRNFVNWYQQLPGTAPKVLIYTNNQRPSGVPDRFSGSKSGT
SASLAISGLQSEDESDYYCAAWDDSLNGWVFGGGTKLTVLG
SEQ ID NO: 624
14094_LC [hu anti-<huCDH19> 25F8.1 (1-235)(K45Q,S102A) VL]
QSALTQPPSATGTPGQRVTISCSGSSSNIGRNFVNWYQQLPGTAPKVLIYTNNQRPSGVPDRFSGSKSGT
SASLAISGLQSEDEADYYCAAWDDSLNGWVFGGGTKLTVLG
SEQ ID NO: 625
14095_LC [hu anti-<huCDH19> 25F8.1 (1-235)(K45Q,S102A) VL]
QSALTQPPSATGTPGQRVTISCSGSSSNIGRNFVNWYQQLPGTAPKVLIYTNNQRPSGVPDRFSGSKSGT
SASLAISGLQSEDEADYYCAAWDDSLNGWVFGGGTKLTVLG
SEQ ID NO: 626
14096_LC [hu anti-<huCDH19> 25F8.1 (1-235)(K45Q,S102A,D111E) VL]
QSALTQPPSATGTPGQRVTISCSGSSSNIGRNFVNWYQQLPGTAPKVLIYTNNQRPSGVPDRFSGSKSGT
SASLAISGLQSEDEADYYCAAWDESLNGWVFGGGTKLTVLG
SEQ ID NO: 627
14097_LC [hu anti-<huCDH19> 25F8.1 (1-235)(K45Q,S102A,D111E,N135Q) VL]
QSALTQPPSATGTPGQRVTISCSGSSSNIGRNFVNWYQQLPGTAPKVLIYTNNQRPSGVPDRFSGSKSGT
SASLAISGLQSEDEADYYCAAWDESLQGWVFGGGTKLTVLG
SEQ ID NO: 628
14098_LC [hu anti-<huCDH19> 22D1.1 (1-235)(K45Q,S102A) VL]
QSALTQPPSATGTPGQRVTISCSGSSSNIGSNFVNWYQQLPGTAPKVLIYTNNQRPSGVPDRFSGSKSGTS
ASLAISGLQSEDEADYYCATWDDSMNGWVFGGGTKLTVLG
SEQ ID NO: 629
14099_LC [hu anti-<huCDH19> 22D1.1 (1-235)(K45Q,S102A,D111E,N135Q) VL]
QSALTQPPSATGTPGQRVTISCSGSSSNIGSNFVNWYQQLPGTAPKVLIYTNNQRPSGVPDRFSGSKSGTS
ASLAISGLQSEDEADYYCATWDESMQGWVFGGGTKLTVLG
SEQ ID NO: 630
14100_LC [hu anti-<huCDH19> 22D1.1 (1-235)(K45Q,S102A,W109Y,D111E,N135Q) VL]
QSALTQPPSATGTPGQRVTISCSGSSSNIGSNFVNWYQQLPGTAPKVLIYTNNQRPSGVPDRFSGSKSGTS
ASLAISGLQSEDEADYYCATYDESMQGWVFGGGTKLTVLG
SEQ ID NO: 631
14101_LC [hu anti-<huCDH19> 22D1.1 (1-235)(K45Q,S102A,W109Y) VL]
QSALTQPPSATGTPGQRVTISCSGSSSNIGSNFVNWYQQLPGTAPKVLIYTNNQRPSGVPDRFSGSKSGTS
ASLAISGLQSEDEADYYCATYDDSMNGWVFGGGTKLTVLG
SEQ ID NO: 632
14102_LC [hu anti-<huCDH19> 22D1.1 (1-235)(K45Q,S102A) VL]
QSALTQPPSATGTPGQRVTISCSGSSSNIGSNFVNWYQQLPGTAPKVLIYTNNQRPSGVPDRFSGSKSGTS
ASLAISGLQSEDEADYYCATWDDSMNGWVFGGGTKLTVLG
SEQ ID NO: 633
13591_LC [hu anti-<huCDH19> 4F7 VL]
QSVLTQPPSVSGAPGQRVTISCTGSSSNIGTGYDVHWYQQLPGTAPKLLIHGNSNRPSGVPDRFSGSKSG
TSASLAITGLQAEDEADYYCQSYDSSLSGWVFGGGTRLTVLG
SEQ ID NO: 634
14301_LC [hu anti-<huCDH19> 2G6 (1-234)(D110E) VL]
SYELTQPPSVSVSPGQTASITCSGDRLGEKYTCWYQQRPGQSPLLVIYQDTKRPSGIPERFSGSNSGNTAT
LTISGTQAMDEADYYCQAWESSTVVFGGGTKLTVLG
SEQ ID NO: 635
14302_LC [hu anti-<huCDH19> 2G6 (1-234)(C42S,D110E) VL]
SYELTQPPSVSVSPGQTASITCSGDRLGEKYTSWYQQRPGQSPLLVIYQDTKRPSGIPERFSGSNSGNTAT
LTISGTQAMDEADYYCQAWESSTVVFGGGTKLTVLG
SEQ ID NO: 636
14303_LC [hu anti-<huCDH19> 2G6 (1-234)(C42S,D110E) VL]
SYELTQPPSVSVSPGQTASITCSGDRLGEKYTSWYQQRPGQSPLLVIYQDTKRPSGIPERFSGSNSGNTAT
LTISGTQAMDEADYYCQAWESSTVVFGGGTKLTVLG
SEQ ID NO: 637
14304_LC [hu anti-<huCDH19> 23A10.3 (1-231)(C42S) VL]
SYELTQPPSVSVSPGQTASITCSGDRLGEKYVSWYQQKPGQSPILVIYQDNKWPSGIPERFSGSNSGNTA
TLTISGTQAMDEADYYCQAWDSSTVVFGGGTKLTVLG
SEQ ID NO: 638

### Anti-CDH19 Variable and Constant Region Polynucleotide and Amino Acid Sequences

TABLE IIIa
Heavy Chain Variable and Contant Region Polynucleotide and Amino acid Sequences

2G6
CAGGTGCAGTTGGTGGAGTCTGGGGGAGGCGTGGTCCAGCCTGGGAGGTCCCTGAGACTCTCCTGT
GCAGCGTCTGGATTCACCTTCAGTAGCTATGGCATGCACTGGGTCCGCCAGGCTCCAGGCAAGGGG
CTGGAGTGGGTGGCATTTATATGGTATGATGGAAGTAATAAATACTATGCAGACTCCGTGAAGGAC
CGATTCACCATCTCCAGAGACAATTCCAAGAACACGCTGTATCTGCAAATGAAAAGCCTGAGAGCT
GAGGACACGGCTGTGTATTACTGTGCGAGAAGGGCCGGTATAATAGGAACTATAGGCTACTACTAC
GGTATGGACGTCTGGGGCCAAGGGACCACGGTCACCGTCTCTAGTGCCTCCACCAAGGGCCCATCG
GTCTTCCCCCTGGCACCCTCCTCCAAGAGCACCTCTGGGGGCACAGCGGCCCTGGGCTGCCTGGTC
AAGGACTACTTCCCCGAACCGGTGACGGTGTCGTGGAACTCAGGCGCCCTGACCAGCGGCGTGCAC
ACCTTCCCGGCTGTCCTACAGTCCTCAGGACTCTACTCCCTCAGCAGCGTGGTGACCGTGCCCTCCA
GCAGCTTGGGCACCCAGACCTACATCTGCAACGTGAATCACAAGCCCAGCAACACCAAGGTGGAC
AAGAAAGTTGAGCCCAAATCTTGTGACAAAACTCACACATGCCCACCGTGCCCAGCACCTGAACTC
CTGGGGGGACCGTCAGTCTTCCTCTTCCCCCCAAAACCCAAGGACACCCTCATGATCTCCCGGACC
CCTGAGGTCACATGCGTGGTGGTGGACGTGAGCCACGAAGACCCTGAGGTCAAGTTCAACTGGTAC
GTGGACGGCGTGGAGGTGCATAATGCCAAGACAAAGCCGCGGGAGGAGCAGTACAACAGCACGT
ACCGTGTGGTCAGCGTCCTCACCGTCCTGCACCAGGACTGGCTGAATGGCAAGGAGTACAAGTGCA
AGGTCTCCAACAAAGCCCTCCCAGCCCCCATCGAGAAAACCATCTCCAAAGCCAAAGGGCAGCCC
CGAGAACCACAGGTGTACACCCTGCCCCCATCCCGGGAGGAGATGACCAAGAACCAGGTCAGCCT
GACCTGCCTGGTCAAAGGCTTCTATCCCAGCGACATCGCCGTGGAGTGGGAGAGCAATGGGCAGC
CGGAGAACAACTACAAGACCACGCCTCCCGTGCTGGACTCCGACGGCTCCTTCTTCCTCTATAGCA
AGCTCACCGTGGACAAGAGCAGGTGGCAGCAGGGGAACGTCTTCTCATGCTCCGTGATGCATGAG
GCTCTGCACAACCACTACACGCAGAAGAGCCTCTCCCTGTCTCCGGGTAAATGA
SEQ ID NO: 639
QVQLVESGGGVVQPGRSLRLSCAASGFTFSSYGMHWVRQAPGKGLEWVAFIWYDGSNKYYADSVKD
RFTISRDNSKNTLYLQMKSLRAEDTAVYYCARRAGIIGTIGYYYGMDVWGQGTTVTVSSASTKGPSVFP
LAPSSKSTSGGTAALGCLVKDYFPEPVTVSWNSGALTSGVHTFPAVLQSSGLYSLSSVVTVPSSSLGTQT
YICNVNHKPSNTKVDKKVEPKSCDKTHTCPPCPAPELLGGPSVFLFPPKPKDTLMISRTPEVTCVVVDVS
HEDPEVKFNWYVDGVEVHNAKTKPREEQYNSTYRVVSVLTVLHQDWLNGKEYKCKVSNKALPAPIE
KTISKAKGQPREPQVYTLPPSREEMTKNQVSLTCLVKGFYPSDIAVEWESNGQPENNYKTTPPVLDSDG
SFFLYSKLTVDKSRWQQGNVFSCSVMHEALHNHYTQKSLSLSPGK
SEQ ID NO: 640
4A2
CAGGTGCAGCTGCAGGAGTCGGGCCCAGGACTGGTGAAGCCTTCACAGACCCTGTCCCTCACCTGC
ACTGTCTCTGGTGGCTCCATCAGCAGTAGTGGTTACTACTGGAGCTGGATCCGCCAGCACCCAGGG
AAGGGCCTGGAGTGGATTGGGTACATCTATTACACTGGGAGCGCCTACTACAACCCGTCCCTCAAG
AGTCGAGTTACCATATCAGTAGACACGTCTAAGAACCAGTTCTCCCTGAAGCTGAGCTCTGTGACT
GCCGCGGACACGGCCGTGTATTACTGTGCGAGAGATGGAAGCAGTGGCTGGTACTTCCAGTATTGG
GGCCAGGGCACCCTGGTCACCGTCTCTAGTGCCTCCACCAAGGGCCCATCGGTCTTCCCCCTGGCA
CCCTCCTCCAAGAGCACCTCTGGGGGCACAGCGGCCCTGGGCTGCCTGGTCAAGGACTACTTCCCC
GAACCGGTGACGGTGTCGTGGAACTCAGGCGCCCTGACCAGCGGCGTGCACACCTTCCCGGCTGTC
CTACAGTCCTCAGGACTCTACTCCCTCAGCAGCGTGGTGACCGTGCCCTCCAGCAGCTTGGGCACC
CAGACCTACATCTGCAACGTGAATCACAAGCCCAGCAACACCAAGGTGGACAAGAAAGTTGAGCC
CAAATCTTGTGACAAAACTCACACATGCCCACCGTGCCCAGCACCTGAACTCCTGGGGGGACCGTC
AGTCTTCCTCTTCCCCCCAAAACCCAAGGACACCCTCATGATCTCCCGGACCCCTGAGGTCACATGC
GTGGTGGTGGACGTGAGCCACGAAGACCCTGAGGTCAAGTTCAACTGGTACGTGGACGGCGTGGA
GGTGCATAATGCCAAGACAAAGCCGCGGGAGGAGCAGTACAACAGCACGTACCGTGTGGTCAGCG
TCCTCACCGTCCTGCACCAGGACTGGCTGAATGGCAAGGAGTACAAGTGCAAGGTCTCCAACAAA
GCCCTCCCAGCCCCCATCGAGAAAACCATCTCCAAAGCCAAAGGGCAGCCCCGAGAACCACAGGT
GTACACCCTGCCCCCATCCCGGGAGGAGATGACCAAGAACCAGGTCAGCCTGACCTGCCTGGTCAA
AGGCTTCTATCCCAGCGACATCGCCGTGGAGTGGGAGAGCAATGGGCAGCCGGAGAACAACTACA
AGACCACGCCTCCCGTGCTGGACTCCGACGGCTCCTTCTTCCTCTATAGCAAGCTCACCGTGGACA
AGAGCAGGTGGCAGCAGGGGAACGTCTTCTCATGCTCCGTGATGCATGAGGCTCTGCACAACCACT
ACACGCAGAAGAGCCTCTCCCTGTCTCCGGGTAAATGA
SEQ ID NO: 641
QVQLQESGPGLVKPSQTLSLTCTVSGGSISSSGYYWSWIRQHPGKGLEWIGYIYYTGSAYYNPSLKSRV
TISVDTSKNQFSLKLSSVTAADTAVYYCARDGSSGWYFQYWGQGTLVTVSSASTKGPSVFPLAPSSKST
SGGTAALGCLVKDYFPEPVTVSWNSGALTSGVHTFPAVLQSSGLYSLSSVVTVPSSSLGTQTYICNVNH
KPSNTKVDKKVEPKSCDKTHTCPPCPAPELLGGPSVFLFPPKPKDTLMISRTPEVTCVVVDVSHEDPEVK
FNWYVDGVEVHNAKTKPREEQYNSTYRVVSVLTVLHQDWLNGKEYKCKVSNKALPAPIEKTISKAKG
QPREPQVYTLPPSREEMTKNQVSLTCLVKGFYPSDIAVEWESNGQPENNYKTTPPVLDSDGSFFLYSKL
TVDKSRWQQGNVFSCSVMHEALHNHYTQKSLSLSPGK
SEQ ID NO: 642
4A9
CAGGTGCAGCTGCAGGAGTCGGGCCCAGGACTGGTGAAGCCTTCGGAGACCCTGTCCCTCACCTGC
ACTGTCTCTGGTGGCTCCATCAGTGGTTACTACTGGAGCTGGATCCGGCAGCCCCCAGGAAAGGGA
CTGGAGTGGTTTGCATATTTCTCTTACAGTGGGAGCACCAACTACAACCCCTCCCTCAAGAGTCGA
GTCACCTTATCAGTAGACACGTCCAAGAACCAGTTCTCCCTGAAGCTGAGCTCTGTGACCGCTGCG
GACACGGCCGTGTATTACTGTGCGAGGAACTGGGCCTTCCACTTTGACTTCTGGGGCCAGGGAACC
CTGGTCACCGTCTCTAGTGCCTCCACCAAGGGCCCATCGGTCTTCCCCCTGGCACCCTCCTCCAAGA
GCACCTCTGGGGGCACAGCGGCCCTGGGCTGCCTGGTCAAGGACTACTTCCCCGAACCGGTGACGG
TGTCGTGGAACTCAGGCGCCCTGACCAGCGGCGTGCACACCTTCCCGGCTGTCCTACAGTCCTCAG
GACTCTACTCCCTCAGCAGCGTGGTGACCGTGCCCTCCAGCAGCTTGGGCACCCAGACCTACATCT
GCAACGTGAATCACAAGCCCAGCAACACCAAGGTGGACAAGAAAGTTGAGCCCAAATCTTGTGAC
AAAACTCACACATGCCCACCGTGCCCAGCACCTGAACTCCTGGGGGGACCGTCAGTCTTCCTCTTC
CCCCCAAAACCCAAGGACACCCTCATGATCTCCCGGACCCCTGAGGTCACATGCGTGGTGGTGGAC
GTGAGCCACGAAGACCCTGAGGTCAAGTTCAACTGGTACGTGGACGGCGTGGAGGTGCATAATGC
CAAGACAAAGCCGCGGGAGGAGCAGTACAACAGCACGTACCGTGTGGTCAGCGTCCTCACCGTCC
TGCACCAGGACTGGCTGAATGGCAAGGAGTACAAGTGCAAGGTCTCCAACAAAGCCCTCCCAGCC
CCCATCGAGAAAACCATCTCCAAAGCCAAAGGGCAGCCCCGAGAACCACAGGTGTACACCCTGCC
CCCATCCCGGGAGGAGATGACCAAGAACCAGGTCAGCCTGACCTGCCTGGTCAAAGGCTTCTATCC
CAGCGACATCGCCGTGGAGTGGGAGAGCAATGGGCAGCCGGAGAACAACTACAAGACCACGCCTC
CCGTGCTGGACTCCGACGGCTCCTTCTTCCTCTATAGCAAGCTCACCGTGGACAAGAGCAGGTGGC
AGCAGGGGAACGTCTTCTCATGCTCCGTGATGCATGAGGCTCTGCACAACCACTACACGCAGAAGA
GCCTCTCCCTGTCTCCGGGTAAATGA
SEQ ID NO: 643
QVQLQESGPGLVKPSETLSLTCTVSGGSISGYYWSWIRQPPGKGLEWFAYFSYSGSTNYNPSLKSRVTLS
VDTSKNQFSLKLSSVTAADTAVYYCARNWAFHFDFWGQGTLVTVSSASTKGPSVFPLAPSSKSTSGGT
AALGCLVKDYFPEPVTVSWNSGALTSGVHTFPAVLQSSGLYSLSSVVTVPSSSLGTQTYICNVNHKPSN
TKVDKKVEPKSCDKTHTCPPCPAPELLGGPSVFLFPPKPKDTLMISRTPEVTCVVVDVSHEDPEVKFNW
YVDGVEVHNAKTKPREEQYNSTYRVVSVLTVLHQDWLNGKEYKCKVSNKALPAPIEKTISKAKGQPR
EPQVYTLPPSREEMTKNQVSLTCLVKGFYPSDIAVEWESNGQPENNYKTTPPVLDSDGSEFLYSKLTVD
KSRWQQGNVFSCSVMHEALHNHYTQKSLSLSPGK
SEQ ID NO: 644
4B10
CAGGTGCAGCTGGTGGAGTCTGGGGGAGGCGTGGTCCAGCCTGGGAGGTCCCTGAGACTCTCCTGT
GCAGCCTCTGGATTCACCTTCAGTAGCTATGACATGCACTGGGTCCGCCAGGCTCCAGGCAAGGGG
CTGGAGTGGGTGGCAGTTATATCATATGATGGAACTAATGAATACTATGCAGACTCCGTGAAGGGC
CGATTCACCATCTCCAGAGACACTTCCAAGAACACGCTGTATTTGCAAATGAACAGCCTGAGAGCT
GAGGACACGGCTGTATATTACTGTGCGAGAGAACGATATTTTGACTGGTCTTTTGACTACTGGGGC
CAGGGAACCCTGGTCAGCGTCTCTAGTGCCTCCACCAAGGGCCCATCGGTCTTCCCCCTGGCACCC
TCCTCCAAGAGCACCTCTGGGGGCACAGCGGCCCTGGGCTGCCTGGTCAAGGACTACTTCCCCGAA
CCGGTGACGGTGTCGTGGAACTCAGGCGCCCTGACCAGCGGCGTGCACACCTTCCCGGCTGTCCTA
CAGTCCTCAGGACTCTACTCCCTCAGCAGCGTGGTGACCGTGCCCTCCAGCAGCTTGGGCACCCAG
ACCTACATCTGCAACGTGAATCACAAGCCCAGCAACACCAAGGTGGACAAGAAAGTTGAGCCCAA
ATCTTGTGACAAAACTCACACATGCCCACCGTGCCCAGCACCTGAACTCCTGGGGGGACCGTCAGT
CTTCCTCTTCCCCCCAAAACCCAAGGACACCCTCATGATCTCCCGGACCCCTGAGGTCACATGCGTG
GTGGTGGACGTGAGCCACGAAGACCCTGAGGTCAAGTTCAACTGGTACGTGGACGGCGTGGAGGT
GCATAATGCCAAGACAAAGCCGCGGGAGGAGCAGTACAACAGCACGTACCGTGTGGTCAGCGTCC
TCACCGTCCTGCACCAGGACTGGCTGAATGGCAAGGAGTACAAGTGCAAGGTCTCCAACAAAGCC
CTCCCAGCCCCCATCGAGAAAACCATCTCCAAAGCCAAAGGGCAGCCCCGAGAACCACAGGTGTA
CACCCTGCCCCCATCCCGGGAGGAGATGACCAAGAACCAGGTCAGCCTGACCTGCCTGGTCAAAG
GCTTCTATCCCAGCGACATCGCCGTGGAGTGGGAGAGCAATGGGCAGCCGGAGAACAACTACAAG
ACCACGCCTCCCGTGCTGGACTCCGACGGCTCCTTCTTCCTCTATAGCAAGCTCACCGTGGACAAG
AGCAGGTGGCAGCAGGGGAACGTCTTCTCATGCTCCGTGATGCATGAGGCTCTGCACAACCACTAC
ACGCAGAAGAGCCTCTCCCTGTCTCCGGGTAAATGA
SEQ ID NO: 645
QVQLVESGGGVVQPGRSLRLSCAASGFTFSSYDMHWVRQAPGKGLEWVAVISYDGTNEYYADSVKGR
FTISRDTSKNTLYLQMNSLRAEDTAVYYCARERYFDWSFDYWGQGTLVSVSSASTKGPSVFPLAPSSKS
TSGGTAALGCLVKDYFPEPVTVSWNSGALTSGVHTFPAVLQSSGLYSLSSVVTVPSSSLGTQTYICNVN
HKPSNTKVDKKVEPKSCDKTHTCPPCPAPELLGGPSVFLFPPKPKDTLMISRTPEVTCVVVDVSHEDPEV
KFNWYVDGVEVHNAKTKPREEQYNSTYRVVSVLTVLHQDWLNGKEYKCKVSNKALPAPIEKTISKAK
GQPREPQVYTLPPSREEMTKNQVSLTCLVKGFYPSDIAVEWESNGQPENNYKTTPPVLDSDGSFFLYSK
LTVDKSRWQQGNVFSCSVMHEALHNHYTQKSLSLSPGK
SEQ ID NO: 646
4F3
CAGGTGCAGCTGGTGGAGTCTGGGGGAGGCGTGGTCCAGCCTGGGAGGTCCCTGAGACTCTCCTGT
GCAGCGTCTGGATTCTCCTTCAGTAGCTATGACATGGACTGGGTCCGCCAGACTCCAGGCAAGGGG
CTGGAGTGGGTGGCAGTTATATGGTATGATGGAAGTAATAAATACTATGCAGACTCCGTGAGGGGC
CGATTCACCATCTCCAGAGACAATTCCAAGAACACGCTGTTTCTGCAAATGAACAGCCTGAGAGTC
GAGGACACGGCTGTGTATTACTGTGCGAGAGAAACTGGGGAGGGCTGGTACTTCGATCTCTGGGGC
CGTGGCACCCTGGTCACCGTCTCTAGTGCCTCCACCAAGGGCCCATCGGTCTTCCCCCTGGCACCCT
CCTCCAAGAGCACCTCTGGGGGCACAGCGGCCCTGGGCTGCCTGGTCAAGGACTACTTCCCCGAAC
CGGTGACGGTGTCGTGGAACTCAGGCGCCCTGACCAGCGGCGTGCACACCTTCCCGGCTGTCCTAC
AGTCCTCAGGACTCTACTCCCTCAGCAGCGTGGTGACCGTGCCCTCCAGCAGCTTGGGCACCCAGA
CCTACATCTGCAACGTGAATCACAAGCCCAGCAACACCAAGGTGGACAAGAAAGTTGAGCCCAAA
TCTTGTGACAAAACTCACACATGCCCACCGTGCCCAGCACCTGAACTCCTGGGGGGACCGTCAGTC
TTCCTCTTCCCCCCAAAACCCAAGGACACCCTCATGATCTCCCGGACCCCTGAGGTCACATGCGTG
GTGGTGGACGTGAGCCACGAAGACCCTGAGGTCAAGTTCAACTGGTACGTGGACGGCGTGGAGGT
GCATAATGCCAAGACAAAGCCGCGGGAGGAGCAGTACAACAGCACGTACCGTGTGGTCAGCGTCC
TCACCGTCCTGCACCAGGACTGGCTGAATGGCAAGGAGTACAAGTGCAAGGTCTCCAACAAAGCC
CTCCCAGCCCCCATCGAGAAAACCATCTCCAAAGCCAAAGGGCAGCCCCGAGAACCACAGGTGTA
CACCCTGCCCCCATCCCGGGAGGAGATGACCAAGAACCAGGTCAGCCTGACCTGCCTGGTCAAAG
GCTTCTATCCCAGCGACATCGCCGTGGAGTGGGAGAGCAATGGGCAGCCGGAGAACAACTACAAG
ACCACGCCTCCCGTGCTGGACTCCGACGGCTCCTTCTTCCTCTATAGCAAGCTCACCGTGGACAAG
AGCAGGTGGCAGCAGGGGAACGTCTTCTCATGCTCCGTGATGCATGAGGCTCTGCACAACCACTAC
ACGCAGAAGAGCCTCTCCCTGTCTCCGGGTAAATGA
SEQ ID NO: 647
QVQLVESGGGVVQPGRSLRLSCAASGFSFSSYDMDWVRQTPGKGLEWVAVIWYDGSNKYYADSVRG
RFTISRDNSKNTLFLQMNSLRVEDTAVYYCARETGEGWYFDLWGRGTLVTVSSASTKGPSVFPLAPSSK
STSGGTAALGCLVKDYFPEPVTVSWNSGALTSGVHTFPAVLQSSGLYSLSSVVTVPSSSLGTQTYICNVN
HKPSNTKVDKKVEPKSCDKTHTCPPCPAPELLGGPSVFLFPPKPKDTLMISRTPEVTCVVVDVSHEDPEV
KFNWYVDGVEVHNAKTKPREEQYNSTYRVVSVLTVLHQDWLNGKEYKCKVSNKALPAPIEKTISKAK
GQPREPQVYTLPPSREEMTKNQVSLTCLVKGFYPSDIAVEWESNGQPENNYKTTPPVLDSDGSFFLYSK
LTVDKSRWQQGNVFSCSVMHEALHNHYTQKSLSLSPGK
SEQ ID NO: 648
4F7
CAGGTGCAGCTGCAGGAGTCGGGCCCAGGACTGGTGAAGCCTTCGGAGACCCTGTCCCTCACCTGC
ACTGTCTCTGGTGGCTCCATCAGTAGTTACTCCTGGAGCTGGATCCGGCAGCCCCCAGGGAAGGGA
CTGGAGTGGATTGGGTATATCTATTACAGTGGGAGCACCAACTACAACCCCTCCCTCAAGAGTCGA
GTCACCATATCATTAGACACGTCCAAGAACCAGTTCTCCCTGAAGCTGAGCTCTGTGACCGCTGCG
GACACGGCCGTGTATTACTGTGCGAGGAACTGGGCCTTCCACTTTGACTACTGGGGCCAGGGAACC
CTGGTCACCGTCTCTAGTGCCTCCACCAAGGGCCCATCGGTCTTCCCCCTGGCACCCTCCTCCAAGA
GCACCTCTGGGGGCACAGCGGCCCTGGGCTGCCTGGTCAAGGACTACTTCCCCGAACCGGTGACGG
TGTCGTGGAACTCAGGCGCCCTGACCAGCGGCGTGCACACCTTCCCGGCTGTCCTACAGTCCTCAG
GACTCTACTCCCTCAGCAGCGTGGTGACCGTGCCCTCCAGCAGCTTGGGCACCCAGACCTACATCT
GCAACGTGAATCACAAGCCCAGCAACACCAAGGTGGACAAGAAAGTTGAGCCCAAATCTTGTGAC
AAAACTCACACATGCCCACCGTGCCCAGCACCTGAACTCCTGGGGGGACCGTCAGTCTTCCTCTTC
CCCCCAAAACCCAAGGACACCCTCATGATCTCCCGGACCCCTGAGGTCACATGCGTGGTGGTGGAC
GTGAGCCACGAAGACCCTGAGGTCAAGTTCAACTGGTACGTGGACGGCGTGGAGGTGCATAATGC
CAAGACAAAGCCGCGGGAGGAGCAGTACAACAGCACGTACCGTGTGGTCAGCGTCCTCACCGTCC
TGCACCAGGACTGGCTGAATGGCAAGGAGTACAAGTGCAAGGTCTCCAACAAAGCCCTCCCAGCC
CCCATCGAGAAAACCATCTCCAAAGCCAAAGGGCAGCCCCGAGAACCACAGGTGTACACCCTGCC
CCCATCCCGGGAGGAGATGACCAAGAACCAGGTCAGCCTGACCTGCCTGGTCAAAGGCTTCTATCC
CAGCGACATCGCCGTGGAGTGGGAGAGCAATGGGCAGCCGGAGAACAACTACAAGACCACGCCTC
CCGTGCTGGACTCCGACGGCTCCTTCTTCCTCTATAGCAAGCTCACCGTGGACAAGAGCAGGTGGC
AGCAGGGGAACGTCTTCTCATGCTCCGTGATGCATGAGGCTCTGCACAACCACTACACGCAGAAGA
GCCTCTCCCTGTCTCCGGGTAAATGA
SEQ ID NO: 649
QVQLQESGPGLVKPSETLSLTCTVSGGSISSYSWSWIRQPPGKGLEWIGYIYYSGSTNYNPSLKSRVTISL
DTSKNQFSLKLSSVTAADTAVYYCARNWAFHFDYWGQGTLVTVSSASTKGPSVFPLAPSSKSTSGGTA
ALGCLVKDYFPEPVTVSWNSGALTSGVHTFPAVLQSSGLYSLSSVVTVPSSSLGTQTYICNVNHKPSNT
KVDKKVEPKSCDKTHTCPPCPAPELLGGPSVFLFPPKPKDTLMISRTPEVTCVVVDVSHEDPEVKFNWY
VDGVEVHNAKTKPREEQYNSTYRVVSVLTVLHQDWLNGKEYKCKVSNKALPAPIEKTISKAKGQPREP
QVYTLPPSREEMTKNQVSLTCLVKGFYPSDIAVEWESNGQPENNYKTTPPVLDSDGSFFLYSKLTVDKS
RWQQGNVFSCSVMHEALHNHYTQKSLSLSPGK
SEQ ID NO: 650
16A4
CAGGTGCAGCTGCAGGAGTCGGGCCCAGGACTGGCGAAGCCTTCGGAGACCCTGTCCCTCACCTGC
ACTGTCTCTGGTGACTCCATCACTAGTTACTACTGGAGCTGGATCCGGCAGCCCCCAGGGAAGGGA
CTGGAGTGGATTGGGTATATCTATTACAGCGGGAGCACCAATTACAACCCCTCCCTCAAGAGTCGA
GTCACCATATCAGTAGACACGTCCAAGAACCAGTTCTCCCTGAAGCTGAGTTCTGTGACCGCTGCG
GACACGGCCGTGTATTACTGTGCGAGAGATCAAAGGCGGATAGCAGCAGCTGGTACCCACTTCTAC
GGTATGGACGTCTGGGGCCAAGGGACCACGGTCACTGTCTCCTCAGCTTCCACCAAGGGCCCATCC
GTCTTCCCCCTGGCGCCCTCCTCCAAGAGCACCTCTGGGGGCACAGCGGCCCTGGGCTGCCTGGTC
AAGGACTACTTCCCCGAACCGGTGACGGTGTCGTGGAACTCAGGGGCCCTGACCAGCGGCGTGCA
CACCTTCCCGGCTGTCCTACAGTCCTCAGGACTCTACTCCCTCAGCAGCGTGGTGACCGTGCCCTCC
AGCAGCTTGGGCACCCAGACCTACATCTGCAACGTGAATCACAAGCCCAGCAACACCAAGGTGGA
CAAGAAAGTTGAGCCCAAATCTTGTGACAAAACTCACACATGCCCACCGTGCCCAGCACCTGAACT
CCTGGGGGGACCGTCAGTCTTCCTCTTCCCCCCAAAACCCAAGGACACCCTCATGATCTCCCGGAC
CCCTGAGGTCACATGCGTGGTGGTGGACGTGAGCCACGAAGACCCTGAGGTCAAGTTCAACTGGTA
CGTGGACGGCGTGGAGGTGCATAATGCCAAGACAAAGCCGCGGGAGGAGCAGTACAACAGCACGT
ACCGTGTGGTCAGCGTCCTCACCGTCCTGCACCAGGACTGGCTGAATGGCAAGGAGTACAAGTGCA
AGGTCTCCAACAAAGCCCTCCCAGCCCCCATCGAGAAAACCATCTCCAAAGCCAAAGGGCAGCCC
CGAGAACCACAGGTGTACACCCTGCCCCCATCCCGGGAGGAGATGACCAAGAACCAGGTCAGCCT
GACCTGCCTGGTCAAAGGCTTCTATCCCAGCGACATCGCCGTGGAGTGGGAGAGCAATGGGCAGC
CGGAGAACAACTACAAGACCACGCCTCCCGTGCTGGACTCCGACGGCTCCTTCTTCCTCTATAGCA
AGCTCACCGTGGACAAGAGCAGGTGGCAGCAGGGGAACGTCTTCTCATGCTCCGTGATGCATGAG
GCTCTGCACAACCACTACACGCAGAAGAGCCTCTCCCTGTCTCCGGGTAAATGA
SEQ ID NO: 651
QVQLQESGPGLAKPSETLSLTCTVSGDSITSYYWSWIRQPPGKGLEWIGYIYYSGSTNYNPSLKSRVTISV
DTSKNQFSLKLSSVTAADTAVYYCARDQRRIAAAGTHFYGMDVWGQGTTVTVSSASTKGPSVFPLAPS
SKSTSGGTAALGCLVKDYFPEPVTVSWNSGALTSGVHTFPAVLQSSGLYSLSSVVTVPSSSLGTQTYICN
VNHKPSNTKVDKKVEPKSCDKTHTCPPCPAPELLGGPSVFLFPPKPKDTLMISRTPEVTCVVVDVSHEDP
EVKFNWYVDGVEVHNAKTKPREEQYNSTYRVVSVLTVLHQDWLNGKEYKCKVSNKALPAPIEKTISK
AKGQPREPQVYTLPPSREEMTKNQVSLTCLVKGFYPSDIAVEWESNGQPENNYKTTPPVLDSDGSFFLY
SKLTVDKSRWQQGNVFSCSVMHEALHNHYTQKSLSLSPGK
SEQ ID NO: 652
16C1
CAGGTGCAGCTGCAGGAGTCGGGCCCAGGACTGGTGAAGCCTTCGGAGACCCTGTCCCTCACTTGT
ACTGTCTCTGGTGGCTCCATCAGTGGTTACTACTGGAGCTGGATCCGGCAGCCCCCAGGGAAGGGA
CTGGAGTGGATTGGGTATATCTATTACATTGGGAGCACCAACTACAACCCCTCCCTCAAGAGTCGA
GTCACCATGTCAATAGACACGTCCAAGAACCAGTTCTCCCTGACGCTGAGCTCTTTGACCGCTGCG
GACACGGCCGTGTATTTCTGTGCGAGAGATGGGAGCAGTGGCTGGTACCGGTGGTTCGACCCCTGG
GGCCAGGGAACCCTGGTCACCGTCTCCTCAGCTTCCACCAAGGGCCCATCCGTCTTCCCCCTGGCG
CCCTCCTCCAAGAGCACCTCTGGGGGCACAGCGGCCCTGGGCTGCCTGGTCAAGGACTACTTCCCC
GAACCGGTGACGGTGTCGTGGAACTCAGGGGCCCTGACCAGCGGCGTGCACACCTTCCCGGCTGTC
CTACAGTCCTCAGGACTCTACTCCCTCAGCAGCGTGGTGACCGTGCCCTCCAGCAGCTTGGGCACC
CAGACCTACATCTGCAACGTGAATCACAAGCCCAGCAACACCAAGGTGGACAAGAAAGTTGAGCC
CAAATCTTGTGACAAAACTCACACATGCCCACCGTGCCCAGCACCTGAACTCCTGGGGGGACCGTC
AGTCTTCCTCTTCCCCCCAAAACCCAAGGACACCCTCATGATCTCCCGGACCCCTGAGGTCACATGC
GTGGTGGTGGACGTGAGCCACGAAGACCCTGAGGTCAAGTTCAACTGGTACGTGGACGGCGTGGA
GGTGCATAATGCCAAGACAAAGCCGCGGGAGGAGCAGTACAACAGCACGTACCGTGTGGTCAGCG
TCCTCACCGTCCTGCACCAGGACTGGCTGAATGGCAAGGAGTACAAGTGCAAGGTCTCCAACAAA
GCCCTCCCAGCCCCCATCGAGAAAACCATCTCCAAAGCCAAAGGGCAGCCCCGAGAACCACAGGT
GTACACCCTGCCCCCATCCCGGGAGGAGATGACCAAGAACCAGGTCAGCCTGACCTGCCTGGTCAA
AGGCTTCTATCCCAGCGACATCGCCGTGGAGTGGGAGAGCAATGGGCAGCCGGAGAACAACTACA
AGACCACGCCTCCCGTGCTGGACTCCGACGGCTCCTTCTTCCTCTATAGCAAGCTCACCGTGGACA
AGAGCAGGTGGCAGCAGGGGAACGTCTTCTCATGCTCCGTGATGCATGAGGCTCTGCACAACCACT
ACACGCAGAAGAGCCTCTCCCTGTCTCCGGGTAAATGA
SEQ ID NO: 653
QVQLQESGPGLVKPSETLSLTCTVSGGSISGYYWSWIRQPPGKGLEWIGYIYYIGSTNYNPSLKSRVTMS
IDTSKNQFSLTLSSLTAADTAVYFCARDGSSGWYRWFDPWGQGTLVTVSSASTKGPSVFPLAPSSKSTS
GGTAALGCLVKDYFPEPVTVSWNSGALTSGVHTFPAVLQSSGLYSLSSVVTVPSSSLGTQTYICNVNHK
PSNTKVDKKVEPKSCDKTHTCPPCPAPELLGGPSVFLFPPKPKDTLMISRTPEVTCVVVDVSHEDPEVKF
NWYVDGVEVHNAKTKPREEQYNSTYRVVSVLTVLHQDWLNGKEYKCKVSNKALPAPIEKTISKAKGQ
PREPQVYTLPPSREEMTKNQVSLTCLVKGFYPSDIAVEWESNGQPENNYKTTPPVLDSDGSFFLYSKLT
VDKSRWQQGNVFSCSVMHEALHNHYTQKSLSLSPGK
SEQ ID NO: 654
17H8
CAGGTGCAGCTGCAGGAGTCGGGCCCAGGACTGGTGAAGCCTTCGGAGACCCTGTCCCTCACGTGC
ACTGTCTCTGGTGGCTCCATCAATAGTTACTACTGGAGCTGGATCCGGCAGCCCCCAGGGAAGGGA
CTGGAGTGGATTGGGTATATCTATTACATTGGGAGCACCAACTACAACCCCTCCCTCAAGAGTCGC
GTCACCATATCAGTAGACACGTCCAAGAACCAGTTCTCCCTGAAGCTGAGCTCTGTGACCGCTGCG
GACACGGCCCTGTATTACTGTGCGAGAGATTCCCGGTATAGAAGTGGCTGGTACGATGCTTTTGAT
ATCTGGGGCCAAGGGACAATGGTCACCGTCTCTTCAGCTTCCACCAAGGGCCCATCCGTCTTCCCC
CTGGCGCCCTCCTCCAAGAGCACCTCTGGGGGCACAGCGGCCCTGGGCTGCCTGGTCAAGGACTAC
TTCCCCGAACCGGTGACGGTGTCGTGGAACTCAGGGGCCCTGACCAGCGGCGTGCACACCTTCCCG
GCTGTCCTACAGTCCTCAGGACTCTACTCCCTCAGCAGCGTGGTGACCGTGCCCTCCAGCAGCTTGG
GCACCCAGACCTACATCTGCAACGTGAATCACAAGCCCAGCAACACCAAGGTGGACAAGAAAGTT
GAGCCCAAATCTTGTGACAAAACTCACACATGCCCACCGTGCCCAGCACCTGAACTCCTGGGGGGA
CCGTCAGTCTTCCTCTTCCCCCCAAAACCCAAGGACACCCTCATGATCTCCCGGACCCCTGAGGTCA
CATGCGTGGTGGTGGACGTGAGCCACGAAGACCCTGAGGTCAAGTTCAACTGGTACGTGGACGGC
GTGGAGGTGCATAATGCCAAGACAAAGCCGCGGGAGGAGCAGTACAACAGCACGTACCGTGTGGT
CAGCGTCCTCACCGTCCTGCACCAGGACTGGCTGAATGGCAAGGAGTACAAGTGCAAGGTCTCCAA
CAAAGCCCTCCCAGCCCCCATCGAGAAAACCATCTCCAAAGCCAAAGGGCAGCCCCGAGAACCAC
AGGTGTACACCCTGCCCCCATCCCGGGAGGAGATGACCAAGAACCAGGTCAGCCTGACCTGCCTG
GTCAAAGGCTTCTATCCCAGCGACATCGCCGTGGAGTGGGAGAGCAATGGGCAGCCGGAGAACAA
CTACAAGACCACGCCTCCCGTGCTGGACTCCGACGGCTCCTTCTTCCTCTATAGCAAGCTCACCGTG
GACAAGAGCAGGTGGCAGCAGGGGAACGTCTTCTCATGCTCCGTGATGCATGAGGCTCTGCACAA
CCACTACACGCAGAAGAGCCTCTCCCTGTCTCCGGGTAAATGA
SEQ ID NO: 655
QVQLQESGPGLVKPSETLSLTCTVSGGSINSYYWSWIRQPPGKGLEWIGYIYYIGSTNYNPSLKSRVTISV
DTSKNQFSLKLSSVTAADTALYYCARDSRYRSGWYDAFDIWGQGTMVTVSSASTKGPSVFPLAPSSKS
TSGGTAALGCLVKDYFPEPVTVSWNSGALTSGVHTFPAVLQSSGLYSLSSVVTVPSSSLGTQTYICNVN
HKPSNTKVDKKVEPKSCDKTHTCPPCPAPELLGGPSVFLFPPKPKDTLMISRTPEVTCVVVDVSHEDPEV
KFNWYVDGVEVHNAKTKPREEQYNSTYRVVSVLTVLHQDWLNGKEYKCKVSNKALPAPIEKTISKAK
GQPREPQVYTLPPSREEMTKNQVSLTCLVKGFYPSDIAVEWESNGQPENNYKTTPPVLDSDGSFFLYSK
LTVDKSRWQQGNVFSCSVMHEALHNHYTQKSLSLSPGK
SEQ ID NO: 656
19B5
CAGGTGCAGTTGGTGCAGTCTGGGGCTGAGGTGAAGAAGCCTGGGGCCTCAGTGAAGGTTTCCTGC
AAGGTTTCTGGATACACCTTCACCAGCTACTTTATTCACTGGGTGCGCCAGGCCCCTGGACAAGGG
CTTGAATGGATGGGAATTATCAACCCTATTAGTGTTAGCACAAGCTACGCACAGAAGTTCCAGGGC
AGAGTCACCATGACCAGGGACACGTCCACGAGCACAGTCTTCATGGAGCTGAGCAGCCTGAGATC
TGAGGACACGGCCGTGTATTACTGTGCGCGAGGGGGGATACAGCTATGGTTACATTTGGACTACTG
GGGCCAGGGAACCCTGGTCACCGTCTCCTCAGCTTCCACCAAGGGCCCATCCGTCTTCCCCCTGGC
GCCCTCCTCCAAGAGCACCTCTGGGGGCACAGCGGCCCTGGGCTGCCTGGTCAAGGACTACTTCCC
CGAACCGGTGACGGTGTCGTGGAACTCAGGGGCCCTGACCAGCGGCGTGCACACCTTCCCGGCTGT
CCTACAGTCCTCAGGACTCTACTCCCTCAGCAGCGTGGTGACCGTGCCCTCCAGCAGCTTGGGCAC
CCAGACCTACATCTGCAACGTGAATCACAAGCCCAGCAACACCAAGGTGGACAAGAAAGTTGAGC
CCAAATCTTGTGACAAAACTCACACATGCCCACCGTGCCCAGCACCTGAACTCCTGGGGGGACCGT
CAGTCTTCCTCTTCCCCCCAAAACCCAAGGACACCCTCATGATCTCCCGGACCCCTGAGGTCACATG
CGTGGTGGTGGACGTGAGCCACGAAGACCCTGAGGTCAAGTTCAACTGGTACGTGGACGGCGTGG
AGGTGCATAATGCCAAGACAAAGCCGCGGGAGGAGCAGTACAACAGCACGTACCGTGTGGTCAGC
GTCCTCACCGTCCTGCACCAGGACTGGCTGAATGGCAAGGAGTACAAGTGCAAGGTCTCCAACAA
AGCCCTCCCAGCCCCCATCGAGAAAACCATCTCCAAAGCCAAAGGGCAGCCCCGAGAACCACAGG
TGTACACCCTGCCCCCATCCCGGGAGGAGATGACCAAGAACCAGGTCAGCCTGACCTGCCTGGTCA
AAGGCTTCTATCCCAGCGACATCGCCGTGGAGTGGGAGAGCAATGGGCAGCCGGAGAACAACTAC
AAGACCACGCCTCCCGTGCTGGACTCCGACGGCTCCTTCTTCCTCTATAGCAAGCTCACCGTGGAC
AAGAGCAGGTGGCAGCAGGGGAACGTCTTCTCATGCTCCGTGATGCATGAGGCTCTGCACAACCAC
TACACGCAGAAGAGCCTCTCCCTGTCTCCGGGTAAATGA
SEQ ID NO: 657
QVQLVQSGAEVKKPGASVKVSCKVSGYTFTSYFIHWVRQAPGQGLEWMGIINPISVSTSYAQKFQGRV
TMTRDTSTSTVFMELSSLRSEDTAVYYCARGGIQLWLHLDYWGQGTLVTVSSASTKGPSVFPLAPSSKS
TSGGTAALGCLVKDYFPEPVTVSWNSGALTSGVHTFPAVLQSSGLYSLSSVVTVPSSSLGTQTYICNVN
HKPSNTKVDKKVEPKSCDKTHTCPPCPAPELLGGPSVFLFPPKPKDTLMISRTPEVTCVVVDVSHEDPEV
KFNWYVDGVEVHNAKTKPREEQYNSTYRVVSVLTVLHQDWLNGKEYKCKVSNKALPAPIEKTISKAK
GQPREPQVYTLPPSREEMTKNQVSLTCLVKGFYPSDIAVEWESNGQPENNYKTTPPVLDSDGSFFLYSK
LTVDKSRWQQGNVFSCSVMHEALHNHYTQKSLSLSPGK
SEQ ID NO: 658
20D3
CAGGTGCAGCTGGTGCAGTCTGGGGCTGAGGTGAAGAAGCCTGGGGCCTCAGTGAAGGTTTCCTGC
AAGGTTTCTGGATACACCTTCACCAGCTACTTTATTCACTGGGTGCGCCAGGCCCCTGGACAAGGG
CTTGAGTGGATGGGAATAATCAACCCTATTAGTGTTAGCACAAGCTACGCACAGAAGTTCCAGGGC
AGAGTCACCATGACCAGGGACACGTCCACGAGCACAGTCTTCATGGAGCTGAGCAGCCTGAGATC
TGAGGACACGGCCGTGTATTACTGTGCGCGAGGGGGGATACAGCTATGGTTACATTTTGACTACTG
GGGCCAGGGAACCCTGGTCACCGTCTCCTCAGCTTCCACCAAGGGCCCATCCGTCTTCCCCCTGGC
GCCCTCCTCCAAGAGCACCTCTGGGGGCACAGCGGCCCTGGGCTGCCTGGTCAAGGACTACTTCCC
CGAACCGGTGACGGTGTCGTGGAACTCAGGGGCCCTGACCAGCGGCGTGCACACCTTCCCGGCTGT
CCTACAGTCCTCAGGACTCTACTCCCTCAGCAGCGTGGTGACCGTGCCCTCCAGCAGCTTGGGCAC
CCAGACCTACATCTGCAACGTGAATCACAAGCCCAGCAACACCAAGGTGGACAAGAAAGTTGAGC
CCAAATCTTGTGACAAAACTCACACATGCCCACCGTGCCCAGCACCTGAACTCCTGGGGGGACCGT
CAGTCTTCCTCTTCCCCCCAAAACCCAAGGACACCCTCATGATCTCCCGGACCCCTGAGGTCACATG
CGTGGTGGTGGACGTGAGCCACGAAGACCCTGAGGTCAAGTTCAACTGGTACGTGGACGGCGTGG
AGGTGCATAATGCCAAGACAAAGCCGCGGGAGGAGCAGTACAACAGCACGTACCGTGTGGTCAGC
GTCCTCACCGTCCTGCACCAGGACTGGCTGAATGGCAAGGAGTACAAGTGCAAGGTCTCCAACAA
AGCCCTCCCAGCCCCCATCGAGAAAACCATCTCCAAAGCCAAAGGGCAGCCCCGAGAACCACAGG
TGTACACCCTGCCCCCATCCCGGGAGGAGATGACCAAGAACCAGGTCAGCCTGACCTGCCTGGTCA
AAGGCTTCTATCCCAGCGACATCGCCGTGGAGTGGGAGAGCAATGGGCAGCCGGAGAACAACTAC
AAGACCACGCCTCCCGTGCTGGACTCCGACGGCTCCTTCTTCCTCTATAGCAAGCTCACCGTGGAC
AAGAGCAGGTGGCAGCAGGGGAACGTCTTCTCATGCTCCGTGATGCATGAGGCTCTGCACAACCAC
TACACGCAGAAGAGCCTCTCCCTGTCTCCGGGTAAATGA
SEQ ID NO: 659
QVQLVQSGAEVKKPGASVKVSCKVSGYTFTSYFIHWVRQAPGQGLEWMGIINPISVSTSYAQKFQGRV
TMTRDTSTSTVFMELSSLRSEDTAVYYCARGGIQLWLHFDYWGQGTLVTVSSASTKGPSVFPLAPSSKS
TSGGTAALGCLVKDYFPEPVTVSWNSGALTSGVHTFPAVLQSSGLYSLSSVVTVPSSSLGTQTYICNVN
HKPSNTKVDKKVEPKSCDKTHTCPPCPAPELLGGPSVFLFPPKPKDTLMISRTPEVTCVVVDVSHEDPEV
KFNWYVDGVEVHNAKTKPREEQYNSTYRVVSVLTVLHQDWLNGKEYKCKVSNKALPAPIEKTISKAK
GQPREPQVYTLPPSREEMTKNQVSLTCLVKGFYPSDIAVEWESNGQPENNYKTTPPVLDSDGSFFLYSK
LTVDKSRWQQGNVFSCSVMHEALHNHYTQKSLSLSPGK
SEQ ID NO: 660
22D1
CAGGTGCAGCTGGTGCAGTCTGGGGCTGAGGTGAAGAAGCCTGGGGCCTCAGTGAGGGTTTCCTGC
AAGGTTTCTGGATACACCTTCACCAGCTACTTTATTCACTGGGTACGCCAGGCCCCTGGACAAGGG
CTTGAGTGGATGGGAATAATCAACCCTATTAGTGTTAGCACAAGCTACGCACAGAAGTTCCAGGGC
AGAGTCACCATGACCAGGGACACGTCCACGAGCACAGTCTTCATGGAGCTGAGCAGCCTGAGATC
TGAGGACACGGCCGTGTATTACTGTGCGCGAGGGGGGATACAGCTATGGTTACATTTGGACTACTG
GGGCCAGGGAACCCTGGTCACCGTCTCCTCAGCTTCCACCAAGGGCCCATCCGTCTTCCCCCTGGC
GCCCTCCTCCAAGAGCACCTCTGGGGGCACAGCGGCCCTGGGCTGCCTGGTCAAGGACTACTTCCC
CGAACCGGTGACGGTGTCGTGGAACTCAGGGGCCCTGACCAGCGGCGTGCACACCTTCCCGGCTGT
CCTACAGTCCTCAGGACTCTACTCCCTCAGCAGCGTGGTGACCGTGCCCTCCAGCAGCTTGGGCAC
CCAGACCTACATCTGCAACGTGAATCACAAGCCCAGCAACACCAAGGTGGACAAGAAAGTTGAGC
CCAAATCTTGTGACAAAACTCACACATGCCCACCGTGCCCAGCACCTGAACTCCTGGGGGGACCGT
CAGTCTTCCTCTTCCCCCCAAAACCCAAGGACACCCTCATGATCTCCCGGACCCCTGAGGTCACATG
CGTGGTGGTGGACGTGAGCCACGAAGACCCTGAGGTCAAGTTCAACTGGTACGTGGACGGCGTGG
AGGTGCATAATGCCAAGACAAAGCCGCGGGAGGAGCAGTACAACAGCACGTACCGTGTGGTCAGC
GTCCTCACCGTCCTGCACCAGGACTGGCTGAATGGCAAGGAGTACAAGTGCAAGGTCTCCAACAA
AGCCCTCCCAGCCCCCATCGAGAAAACCATCTCCAAAGCCAAAGGGCAGCCCCGAGAACCACAGG
TGTACACCCTGCCCCCATCCCGGGAGGAGATGACCAAGAACCAGGTCAGCCTGACCTGCCTGGTCA
AAGGCTTCTATCCCAGCGACATCGCCGTGGAGTGGGAGAGCAATGGGCAGCCGGAGAACAACTAC
AAGACCACGCCTCCCGTGCTGGACTCCGACGGCTCCTTCTTCCTCTATAGCAAGCTCACCGTGGAC
AAGAGCAGGTGGCAGCAGGGGAACGTCTTCTCATGCTCCGTGATGCATGAGGCTCTGCACAACCAC
TACACGCAGAAGAGCCTCTCCCTGTCTCCGGGTAAATGA
SEQ ID NO: 661
QVQLVQSGAEVKKPGASVRVSCKVSGYTFTSYFIHWVRQAPGQGLEWMGIINPISVSTSYAQKFQGRV
TMTRDTSTSTVFMELSSLRSEDTAVYYCARGGIQLWLHLDYWGQGTLVTVSSASTKGPSVFPLAPSSKS
TSGGTAALGCLVKDYFPEPVTVSWNSGALTSGVHTFPAVLQSSGLYSLSSVVTVPSSSLGTQTYICNVN
HKPSNTKVDKKVEPKSCDKTHTCPPCPAPELLGGPSVFLFPPKPKDTLMISRTPEVTCVVVDVSHEDPEV
KFNWYVDGVEVHNAKTKPREEQYNSTYRVVSVLTVLHQDWLNGKEYKCKVSNKALPAPIEKTISKAK
GQPREPQVYTLPPSREEMTKNQVSLTCLVKGFYPSDIAVEWESNGQPENNYKTTPPVLDSDGSFFLYSK
LTVDKSRWQQGNVFSCSVMHEALHNHYTQKSLSLSPGK
SEQ ID NO: 662
22G10
GAGGTGCAACTGTTGGAGTCTGGGGGAGGCTTGGTACAGCCTGGGGGGTCCCTGAGACTCTCCTGT
GCAGCCTCTGGATTCACCTTTAGCAGTTATGCCATGAACTGGGTCCGCCAGGCTCCAGGGAAGGGG
CTGGAGTGGGTCTCAACTATTAGTGGTGGTGGTGCTAACACATACTACGCAGACTCCGTGAAGGGC
CGGTTCACCATCTCCAGTGACAATTCCAAGAGCACGCTGTATCTGCAAATGAACAGCCTGAGAGCC
GCGGACACGGCCGTATATCACTGTGCGAAAGGGGGAATGGGGGGATACTACTACGGTATGGACGT
CTGGGGCCAAGGGACCACGGTCACCGTCTCCTCAGCTTCCACCAAGGGCCCATCCGTCTTCCCCCT
GGCGCCCTCCTCCAAGAGCACCTCTGGGGGCACAGCGGCCCTGGGCTGCCTGGTCAAGGACTACTT
CCCCGAACCGGTGACGGTGTCGTGGAACTCAGGGGCCCTGACCAGCGGCGTGCACACCTTCCCGGC
TGTCCTACAGTCCTCAGGACTCTACTCCCTCAGCAGCGTGGTGACCGTGCCCTCCAGCAGCTTGGGC
ACCCAGACCTACATCTGCAACGTGAATCACAAGCCCAGCAACACCAAGGTGGACAAGAAAGTTGA
GCCCAAATCTTGTGACAAAACTCACACATGCCCACCGTGCCCAGCACCTGAACTCCTGGGGGGACC
GTCAGTCTTCCTCTTCCCCCCAAAACCCAAGGACACCCTCATGATCTCCCGGACCCCTGAGGTCACA
TGCGTGGTGGTGGACGTGAGCCACGAAGACCCTGAGGTCAAGTTCAACTGGTACGTGGACGGCGT
GGAGGTGCATAATGCCAAGACAAAGCCGCGGGAGGAGCAGTACAACAGCACGTACCGTGTGGTCA
GCGTCCTCACCGTCCTGCACCAGGACTGGCTGAATGGCAAGGAGTACAAGTGCAAGGTCTCCAACA
AAGCCCTCCCAGCCCCCATCGAGAAAACCATCTCCAAAGCCAAAGGGCAGCCCCGAGAACCACAG
GTGTACACCCTGCCCCCATCCCGGGAGGAGATGACCAAGAACCAGGTCAGCCTGACCTGCCTGGTC
AAAGGCTTCTATCCCAGCGACATCGCCGTGGAGTGGGAGAGCAATGGGCAGCCGGAGAACAACTA
CAAGACCACGCCTCCCGTGCTGGACTCCGACGGCTCCTTCTTCCTCTATAGCAAGCTCACCGTGGAC
AAGAGCAGGTGGCAGCAGGGGAACGTCTTCTCATGCTCCGTGATGCATGAGGCTCTGCACAACCAC
TACACGCAGAAGAGCCTCTCCCTGTCTCCGGGTAAATGA
SEQ ID NO: 663
EVQLLESGGGLVQPGGSLRLSCAASGFTFSSYAMNWVRQAPGKGLEWVSTISGGGANTYYADSVKGR
FTISSDNSKSTLYLQMNSLRAADTAVYHCAKGGMGGYYYGMDVWGQGTTVTVSSASTKGPSVFPLAP
SSKSTSGGTAALGCLVKDYFPEPVTVSWNSGALTSGVHTFPAVLQSSGLYSLSSVVTVPSSSLGTQTYIC
NVNHKPSNTKVDKKVEPKSCDKTHTCPPCPAPELLGGPSVFLFPPKPKDTLMISRTPEVTCVVVDVSHE
DPEVKFNWYVDGVEVHNAKTKPREEQYNSTYRVVSVLTVLHQDWLNGKEYKCKVSNKALPAPIEKTI
SKAKGQPREPQVYTLPPSREEMTKNQVSLTCLVKGFYPSDIAVEWESNGQPENNYKTTPPVLDSDGSFF
LYSKLTVDKSRWQQGNVFSCSVMHEALHNHYTQKSLSLSPGK
SEQ ID NO: 664
23A10
CAGGTGCAGCTGGTGGAGTCTGGGGGAGGCGTGGTCCAGCCTGGGAGGTCCCTGAGACTCTCCTGT
GCAGCGTCTGGATTCACCTTCAGTCGCTATGGCATACACTGGGTCCGCCAGGCTCCAGGCAAGGGG
CTGGAGTGGGTGGCAGTTATATGGTATGATGGAAGTAATAAATACTATGCAGACTCCGTGAAGGGC
CGATTCACCATCTCCAGAGACAATTCCAAGAACACGCTGTATCTGCTAATGAACAGCCTGAGAGCC
GAGGACTCGGCTGTGTATTACTGTGCGAGAAGGGCCGGTATACCTGGAACTACGGGCTACTACTAT
GGTATGGACGTCTGGGGCCAAGGGACCACGGTCACCGTCTCCTCAGCTTCCACCAAGGGCCCATCC
GTCTTCCCCCTGGCGCCCTCCTCCAAGAGCACCTCTGGGGGCACAGCGGCCCTGGGCTGCCTGGTC
AAGGACTACTTCCCCGAACCGGTGACGGTGTCGTGGAACTCAGGGGCCCTGACCAGCGGCGTGCA
CACCTTCCCGGCTGTCCTACAGTCCTCAGGACTCTACTCCCTCAGCAGCGTGGTGACCGTGCCCTCC
AGCAGCTTGGGCACCCAGACCTACATCTGCAACGTGAATCACAAGCCCAGCAACACCAAGGTGGA
CAAGAAAGTTGAGCCCAAATCTTGTGACAAAACTCACACATGCCCACCGTGCCCAGCACCTGAACT
CCTGGGGGGACCGTCAGTCTTCCTCTTCCCCCCAAAACCCAAGGACACCCTCATGATCTCCCGGAC
CCCTGAGGTCACATGCGTGGTGGTGGACGTGAGCCACGAAGACCCTGAGGTCAAGTTCAACTGGTA
CGTGGACGGCGTGGAGGTGCATAATGCCAAGACAAAGCCGCGGGAGGAGCAGTACAACAGCACGT
ACCGTGTGGTCAGCGTCCTCACCGTCCTGCACCAGGACTGGCTGAATGGCAAGGAGTACAAGTGCA
AGGTCTCCAACAAAGCCCTCCCAGCCCCCATCGAGAAAACCATCTCCAAAGCCAAAGGGCAGCCC
CGAGAACCACAGGTGTACACCCTGCCCCCATCCCGGGAGGAGATGACCAAGAACCAGGTCAGCCT
GACCTGCCTGGTCAAAGGCTTCTATCCCAGCGACATCGCCGTGGAGTGGGAGAGCAATGGGCAGC
CGGAGAACAACTACAAGACCACGCCTCCCGTGCTGGACTCCGACGGCTCCTTCTTCCTCTATAGCA
AGCTCACCGTGGACAAGAGCAGGTGGCAGCAGGGGAACGTCTTCTCATGCTCCGTGATGCATGAG
GCTCTGCACAACCACTACACGCAGAAGAGCCTCTCCCTGTCTCCGGGTAAATGA
SEQ ID NO: 665
QVQLVESGGGVVQPGRSLRLSCAASGFTFSRYGIHWVRQAPGKGLEWVAVIWYDGSNKYYADSVKGR
FTISRDNSKNTLYLLMNSLRAEDSAVYYCARRAGIPGTTGYYYGMDVWGQGTTVTVSSASTKGPSVFP
LAPSSKSTSGGTAALGCLVKDYFPEPVTVSWNSGALTSGVHTFPAVLQSSGLYSLSSVVTVPSSSLGTQT
YICNVNHKPSNTKVDKKVEPKSCDKTHTCPPCPAPELLGGPSVFLFPPKPKDTLMISRTPEVTCVVVDVS
HEDPEVKFNWYVDGVEVHNAKTKPREEQYNSTYRVVSVLTVLHQDWLNGKEYKCKVSNKALPAPIE
KTISKAKGQPREPQVYTLPPSREEMTKNQVSLTCLVKGFYPSDIAVEWESNGQPENNYKTTPPVLDSDG
SFFLYSKLTVDKSRWQQGNVFSCSVMHEALHNHYTQKSLSLSPGK
SEQ ID NO: 666
25F8
CAGGTGCAGCTGGTGCAGTCTGGGGCTGAGGTGAAGAAGCCTGGGGCCTCAGTGAAGGTTTCCTGC
AAGGCATCTGGATACACCTTCACCAGCTACTATATTCACTGGGTGCGCCAGGCCCCTGGACAAGGA
CTTGAGTGGATGGGAATAATCAACCCCAGTGGTGGTAGCACAAGGTACGCACAGAAGTTCCAGGG
CAGAGTCACCATGACCAGGGACACGTCCACGAGCACAGTCTTCATGGAGCTGAGCAGCCTGAGAT
CTGAGGACACGGCCGTGTATTACTGTGCGCGAGGGGGAATACAGCTATGGTTACATTTTGACTACT
GGGGCCAGGGAACCCTGGTCACCGTCTCCTCAGCTTCCACCAAGGGCCCATCCGTCTTCCCCCTGG
CGCCCTCCTCCAAGAGCACCTCTGGGGGCACAGCGGCCCTGGGCTGCCTGGTCAAGGACTACTTCC
CCGAACCGGTGACGGTGTCGTGGAACTCAGGGGCCCTGACCAGCGGCGTGCACACCTTCCCGGCTG
TCCTACAGTCCTCAGGACTCTACTCCCTCAGCAGCGTGGTGACCGTGCCCTCCAGCAGCTTGGGCA
CCCAGACCTACATCTGCAACGTGAATCACAAGCCCAGCAACACCAAGGTGGACAAGAAAGTTGAG
CCCAAATCTTGTGACAAAACTCACACATGCCCACCGTGCCCAGCACCTGAACTCCTGGGGGGACCG
TCAGTCTTCCTCTTCCCCCCAAAACCCAAGGACACCCTCATGATCTCCCGGACCCCTGAGGTCACAT
GCGTGGTGGTGGACGTGAGCCACGAAGACCCTGAGGTCAAGTTCAACTGGTACGTGGACGGCGTG
GAGGTGCATAATGCCAAGACAAAGCCGCGGGAGGAGCAGTACAACAGCACGTACCGTGTGGTCAG
CGTCCTCACCGTCCTGCACCAGGACTGGCTGAATGGCAAGGAGTACAAGTGCAAGGTCTCCAACAA
AGCCCTCCCAGCCCCCATCGAGAAAACCATCTCCAAAGCCAAAGGGCAGCCCCGAGAACCACAGG
TGTACACCCTGCCCCCATCCCGGGAGGAGATGACCAAGAACCAGGTCAGCCTGACCTGCCTGGTCA
AAGGCTTCTATCCCAGCGACATCGCCGTGGAGTGGGAGAGCAATGGGCAGCCGGAGAACAACTAC
AAGACCACGCCTCCCGTGCTGGACTCCGACGGCTCCTTCTTCCTCTATAGCAAGCTCACCGTGGAC
AAGAGCAGGTGGCAGCAGGGGAACGTCTTCTCATGCTCCGTGATGCATGAGGCTCTGCACAACCAC
TACACGCAGAAGAGCCTCTCCCTGTCTCCGGGTAAATGA
SEQ ID NO: 667
QVQLVQSGAEVKKPGASVKVSCKASGYTFTSYYTHWVRQAPGQGLEWMGIINPSGGSTRYAQKFQGR
VTMTRDTSTSTVFMELSSLRSEDTAVYYCARGGIQLWLHFDYWGQGTLVTVSSASTKGPSVFPLAPSSK
STSGGTAALGCLVKDYFPEPVTVSWNSGALTSGVHTFPAVLQSSGLYSLSSVVTVPSSSLGTQTYICNVN
HKPSNTKVDKKVEPKSCDKTHTCPPCPAPELLGGPSVFLFPPKPKDTLMISRTPEVTCVVVDVSHEDPEV
KFNWYVDGVEVHNAKTKPREEQYNSTYRVVSVLTVLHQDWLNGKEYKCKVSNKALPAPIEKTISKAK
GQPREPQVYTLPPSREEMTKNQVSLTCLVKGFYPSDIAVEWESNGQPENNYKTTPPVLDSDGSFFLYSK
LTVDKSRWQQGNVFSCSVMHEALHNHYTQKSLSLSPGK
SEQ ID NO: 668
25G10
CAGGTGCAGCTGCAGGAGTCGGGCCCAGGACTGGTGAAGCCTTCGGAGACCCTGTCCCTCACCTGC
ACTGTCTCTGGTGGCTCCATCAGTGGTTACTACTGGAGCTGGATCCGGCAGCCCCCAGGGAAGGGA
CTGGAGTGGATTGGGTATATCTATTACATTGGGAGCACCAACTACAACCCCTCCCTCAAGAGTCGA
GTCACCATGTCAGTAGACACGTCCAAGAACCAGTTCTCCCTGAAGCTGAGCTCTGTGACCGCTGCG
GACACGGCCGTGTATTACTGTGCGAGAGATGGGAGCAGTGGCTGGTACCGGTGGTTCGACCCCTGG
GGCCAGGGAACCCTGGTCACCGTCTCCTCAGCTTCCACCAAGGGCCCATCCGTCTTCCCCCTGGCG
CCCTCCTCCAAGAGCACCTCTGGGGGCACAGCGGCCCTGGGCTGCCTGGTCAAGGACTACTTCCCC
GAACCGGTGACGGTGTCGTGGAACTCAGGGGCCCTGACCAGCGGCGTGCACACCTTCCCGGCTGTC
CTACAGTCCTCAGGACTCTACTCCCTCAGCAGCGTGGTGACCGTGCCCTCCAGCAGCTTGGGCACC
CAGACCTACATCTGCAACGTGAATCACAAGCCCAGCAACACCAAGGTGGACAAGAAAGTTGAGCC
CAAATCTTGTGACAAAACTCACACATGCCCACCGTGCCCAGCACCTGAACTCCTGGGGGGACCGTC
AGTCTTCCTCTTCCCCCCAAAACCCAAGGACACCCTCATGATCTCCCGGACCCCTGAGGTCACATGC
GTGGTGGTGGACGTGAGCCACGAAGACCCTGAGGTCAAGTTCAACTGGTACGTGGACGGCGTGGA
GGTGCATAATGCCAAGACAAAGCCGCGGGAGGAGCAGTACAACAGCACGTACCGTGTGGTCAGCG
TCCTCACCGTCCTGCACCAGGACTGGCTGAATGGCAAGGAGTACAAGTGCAAGGTCTCCAACAAA
GCCCTCCCAGCCCCCATCGAGAAAACCATCTCCAAAGCCAAAGGGCAGCCCCGAGAACCACAGGT
GTACACCCTGCCCCCATCCCGGGAGGAGATGACCAAGAACCAGGTCAGCCTGACCTGCCTGGTCAA
AGGCTTCTATCCCAGCGACATCGCCGTGGAGTGGGAGAGCAATGGGCAGCCGGAGAACAACTACA
AGACCACGCCTCCCGTGCTGGACTCCGACGGCTCCTTCTTCCTCTATAGCAAGCTCACCGTGGACA
AGAGCAGGTGGCAGCAGGGGAACGTCTTCTCATGCTCCGTGATGCATGAGGCTCTGCACAACCACT
ACACGCAGAAGAGCCTCTCCCTGTCTCCGGGTAAATGA
SEQ ID NO: 669
QVQLQESGPGLVKPSETLSLTCTVSGGSISGYYWSWIRQPPGKGLEWIGYIYYIGSTNYNPSLKSRVTMS
VDTSKNQFSLKLSSVTAADTAVYYCARDGSSGWYRWFDPWGQGTLVTVSSASTKGPSVFPLAPSSKST
SGGTAALGCLVKDYFPEPVTVSWNSGALTSGVHTFPAVLQSSGLYSLSSVVTVPSSSLGTQTYICNVNH
KPSNTKVDKKVEPKSCDKTHTCPPCPAPELLGGPSVFLFPPKPKDTLMISRTPEVTCVVVDVSHEDPEVK
FNWYVDGVEVHNAKTKPREEQYNSTYRVVSVLTVLHQDWLNGKEYKCKVSNKALPAPIEKTISKAKG
QPREPQVYTLPPSREEMTKNQVSLTCLVKGFYPSDIAVEWESNGQPENNYKTTPPVLDSDGSFFLYSKL
TVDKSRWQQGNVFSCSVMHEALHNHYTQKSLSLSPG
SEQ ID NO: 670
26D1
CAGGTGCAGTTGGTGCAGTCTGGGGCTGAGGTGAAGAAGCCTGGGGCCTCAGTGAAGGTTTCCTGT
AAGGCATCTAGATACACCTTCACCAGCTACTATATGTCCTGGGTGCGACAGGCCCCTGGACAAGGG
CTTGAGTGGATGGGAATAATCCACCCTAGTGGTGGTGACACAACCTACGCACAGAAGTTCCAGGGC
AGAGTCACCATGACCGGGGACACGTCCACGAGCACAGTCTACATGGAGCTGAGCAGCCTGAGATC
TGAGGACACGGCCGTGTATTACTGTGCGAGAGGGGGGATAAAACTATGGTTACATTTTGACTATTG
GGGCCAGGGAACCCTGGTCACCGTCTCCTCAGCTTCCACCAAGGGCCCATCCGTCTTCCCCCTGGC
GCCCTCCTCCAAGAGCACCTCTGGGGGCACAGCGGCCCTGGGCTGCCTGGTCAAGGACTACTTCCC
CGAACCGGTGACGGTGTCGTGGAACTCAGGGGCCCTGACCAGCGGCGTGCACACCTTCCCGGCTGT
CCTACAGTCCTCAGGACTCTACTCCCTCAGCAGCGTGGTGACCGTGCCCTCCAGCAGCTTGGGCAC
CCAGACCTACATCTGCAACGTGAATCACAAGCCCAGCAACACCAAGGTGGACAAGAAAGTTGAGC
CCAAATCTTGTGACAAAACTCACACATGCCCACCGTGCCCAGCACCTGAACTCCTGGGGGGACCGT
CAGTCTTCCTCTTCCCCCCAAAACCCAAGGACACCCTCATGATCTCCCGGACCCCTGAGGTCACATG
CGTGGTGGTGGACGTGAGCCACGAAGACCCTGAGGTCAAGTTCAACTGGTACGTGGACGGCGTGG
AGGTGCATAATGCCAAGACAAAGCCGCGGGAGGAGCAGTACAACAGCACGTACCGTGTGGTCAGC
GTCCTCACCGTCCTGCACCAGGACTGGCTGAATGGCAAGGAGTACAAGTGCAAGGTCTCCAACAA
AGCCCTCCCAGCCCCCATCGAGAAAACCATCTCCAAAGCCAAAGGGCAGCCCCGAGAACCACAGG
TGTACACCCTGCCCCCATCCCGGGAGGAGATGACCAAGAACCAGGTCAGCCTGACCTGCCTGGTCA
AAGGCTTCTATCCCAGCGACATCGCCGTGGAGTGGGAGAGCAATGGGCAGCCGGAGAACAACTAC
AAGACCACGCCTCCCGTGCTGGACTCCGACGGCTCCTTCTTCCTCTATAGCAAGCTCACCGTGGAC
AAGAGCAGGTGGCAGCAGGGGAACGTCTTCTCATGCTCCGTGATGCATGAGGCTCTGCACAACCAC
TACACGCAGAAGAGCCTCTCCCTGTCTCCGGGTAAATGA
SEQ ID NO: 671
QVQLVQSGAEVKKPGASVKVSCKASRYTFTSYYMSWVRQAPGQGLEWMGIIHPSGGDTTYAQKFQGR
VTMTGDTSTSTVYMELSSLRSEDTAVYYCARGGIKLWLHFDYWGQGTLVTVSSASTKGPSVFPLAPSS
KSTSGGTAALGCLVKDYFPEPVTVSWNSGALTSGVHTFPAVLQSSGLYSLSSVVTVPSSSLGTQTYICNV
NHKPSNTKVDKKVEPKSCDKTHTCPPCPAPELLGGPSVFLFPPKPKDTLMISRTPEVTCVVVDVSHEDPE
VKFNWYVDGVEVHNAKTKPREEQYNSTYRVVSVLTVLHQDWLNGKEYKCKVSNKALPAPIEKTISKA
KGQPREPQVYTLPPSREEMTKNQVSLTCLVKGFYPSDIAVEWESNGQPENNYKTTPPVLDSDGSFFLYS
KLTVDKSRWQQGNVFSCSVMHEALHNHYTQKSLSLSPGK
SEQ ID NO: 672
26F12
CAGGTGCAGTTGGTGCAGTCTGGGGCTGAGGTGAAGAAGCCTGGGGCCTCAGTGAAGGTTTCCTGC
AAGGCATCTAGATACACCTTCACCAACTACTATATGTCCTGGGTGCGACAGGCCCCTGGACAAGGG
CTTGAGTGGATGGGAATAATCAACCCTAGTGGTGGTGACTCAACCTACGCACAGAAGTTCCAGGGC
AGACTCACCATGACCGGGGACACGTCCACGAGCACAGTCTACATGGAGCTGAGCAGCCTGAGATC
TGAGGACACGGCCGTGTATTACTGTGCGAGAGGGGGGATACAACTATGGTTACATTTTGACTACTG
GGGCCAGGGAACCCTGGTCACCGTCTCCTCAGCTTCCACCAAGGGCCCATCCGTCTTCCCCCTGGC
GCCCTCCTCCAAGAGCACCTCTGGGGGCACAGCGGCCCTGGGCTGCCTGGTCAAGGACTACTTCCC
CGAACCGGTGACGGTGTCGTGGAACTCAGGGGCCCTGACCAGCGGCGTGCACACCTTCCCGGCTGT
CCTACAGTCCTCAGGACTCTACTCCCTCAGCAGCGTGGTGACCGTGCCCTCCAGCAGCTTGGGCAC
CCAGACCTACATCTGCAACGTGAATCACAAGCCCAGCAACACCAAGGTGGACAAGAAAGTTGAGC
CCAAATCTTGTGACAAAACTCACACATGCCCACCGTGCCCAGCACCTGAACTCCTGGGGGGACCGT
CAGTCTTCCTCTTCCCCCCAAAACCCAAGGACACCCTCATGATCTCCCGGACCCCTGAGGTCACATG
CGTGGTGGTGGACGTGAGCCACGAAGACCCTGAGGTCAAGTTCAACTGGTACGTGGACGGCGTGG
AGGTGCATAATGCCAAGACAAAGCCGCGGGAGGAGCAGTACAACAGCACGTACCGTGTGGTCAGC
GTCCTCACCGTCCTGCACCAGGACTGGCTGAATGGCAAGGAGTACAAGTGCAAGGTCTCCAACAA
AGCCCTCCCAGCCCCCATCGAGAAAACCATCTCCAAAGCCAAAGGGCAGCCCCGAGAACCACAGG
TGTACACCCTGCCCCCATCCCGGGAGGAGATGACCAAGAACCAGGTCAGCCTGACCTGCCTGGTCA
AAGGCTTCTATCCCAGCGACATCGCCGTGGAGTGGGAGAGCAATGGGCAGCCGGAGAACAACTAC
AAGACCACGCCTCCCGTGCTGGACTCCGACGGCTCCTTCTTCCTCTATAGCAAGCTCACCGTGGAC
AAGAGCAGGTGGCAGCAGGGGAACGTCTTCTCATGCTCCGTGATGCATGAGGCTCTGCACAACCAC
TACACGCAGAAGAGCCTCTCCCTGTCTCCGGGTAAATGA
SEQ ID NO: 673
QVQLVQSGAEVKKPGASVKVSCKASRYTFTNYYMSWVRQAPGQGLEWMGIINPSGGDSTYAQKFQG
RLTMTGDTSTSTVYMELSSLRSEDTAVYYCARGGIQLWLHFDYWGQGTLVTVSSASTKGPSVFPLAPSS
KSTSGGTAALGCLVKDYFPEPVTVSWNSGALTSGVHTFPAVLQSSGLYSLSSVVTVPSSSLGTQTYICNV
NHKPSNTKVDKKVEPKSCDKTHTCPPCPAPELLGGPSVFLFPPKPKDTLMISRTPEVTCVVVDVSHEDPE
VKFNWYVDGVEVHNAKTKPREEQYNSTYRVVSVLTVLHQDWLNGKEYKCKVSNKALPAPIEKTISKA
KGQPREPQVYTLPPSREEMTKNQVSLTCLVKGFYPSDIAVEWESNGQPENNYKTTPPVLDSDGSFFLYS
KLTVDKSRWQQGNVFSCSVMHEALHNHYTQKSLSLSPGK
SEQ ID NO: 674

TABLE IIIb
Light Chain Variable and Contant Region Polynucleotide
and Amino acid Sequences

2G6
TCCTATGAACTGACTCAGCCACCCTCAGTGTCCGTGTCCCCAGGACAGACAGCCAGCATCACCTGC
TCTGGAGATAGGTTGGGGGAAAAATATACTTGCTGGTATCAGCAGAGGCCAGGCCAGTCCCCTTTG
CTGGTCATCTATCAAGATACCAAGCGGCCCTCAGGGATCCCTGAGCGATTCTCTGGCTCCAACTCT
GGTAACACAGCCACTCTGACCATCAGCGGGACCCAGGCTATGGATGAGGCTGACTATTACTGTCAG
GCGTGGGACAGCAGCACTGTGGTATTCGGCGGAGGGACCAAGCTGACCGTCCTAGGTCAGCCCAA
GGCCAACCCCACTGTCACTCTGTTCCCGCCCTCCTCTGAGGAGCTCCAAGCCAACAAGGCCACACT
AGTGTGTCTGATCAGTGACTTCTACCCGGGAGCTGTGACAGTGGCCTGGAAGGCAGATGGCAGCCC
CGTCAAGGCGGGAGTGGAGACCACCAAACCCTCCAAACAGAGCAACAACAAGTACGCGGCCAGCA
GCTACCTGAGCCTGACGCCCGAGCAGTGGAAGTCCCACAGAAGCTACAGCTGCCAGGTCACGCAT
GAAGGGAGCACCGTGGAGAAGACAGTGGCCCCTACAGAATGTTCATGA
SEQ ID NO: 675
SYELTQPPSVSVSPGQTASITCSGDRLGEKYTCWYQQRPGQSPLLVIYQDTKRPSGIPERFSGSNSGNTAT
LTISGTQAMDEADYYCQAWDSSTVVFGGGTKLTVLGQPKANPTVTLFPPSSEELQANKATLVCLISDFY
PGAVTVAWKADGSPVKAGVETTKPSKQSNNKYAASSYLSLTPEQWKSHRSYSCQVTHEGSTVEKTVA
PTECS
SEQ ID NO: 676
4A2
GAAATTGTGTTGACGCAGTCTCCAGGCACCCTGTCTTTGTCTCCAGGGGAAAGAGCCACCCTCTCCT
GCAGGGCCAGTCGGAATATTAGCAGCAGCTACTTAGCCTGGTACCAGCAGAAACCTGGCCAGGCT
CCCAGGCTCCTCATCTATGGTCCATCCAGCAGGGCCACTGGCATCCCAGACAGGTTCAGTGGCAGT
GGGTCTGGGACAGACTTCACTCTCACCATCAGCAGACTGGAGCCTGAAGATTTTACAGTGTATTAC
TGTCAGCAGTATGGTAGCTCATTCACTTTCGGCCCTGGGACCAAAGTGGATATCAAACGTACGGTG
GCTGCACCATCTGTCTTCATCTTCCCGCCATCTGATGAGCAGTTGAAATCTGGAACTGCCTCTGTTG
TGTGCCTGCTGAATAACTTCTATCCCAGAGAGGCCAAAGTACAGTGGAAGGTGGATAACGCCCTCC
AATCGGGTAACTCCCAGGAGAGTGTCACAGAGCAGGACAGCAAGGACAGCACCTACAGCCTCAGC
AGCACCCTGACGCTGAGCAAAGCAGACTACGAGAAACACAAAGTCTACGCCTGCGAAGTCACCCA
TCAGGGCCTGAGCTCGCCCGTCACAAAGAGCTTCAACAGGGGAGAGTGTTGA
SEQ ID NO: 677
EIVLTQSPGTLSLSPGERATLSCRASRNISSSYLAWYQQKPGQAPRLLIYGPSSRATGIPDRFSGSGSGTDF
TLTISRLEPEDFTVYYCQQYGSSFTFGPGTKVDIKRTVAAPSVFIFPPSDEQLKSGTASVVCLLNNFYPRE
AKVQWKVDNALQSGNSQESVTEQDSKDSTYSLSSTLTLSKADYEKHKVYACEVTHQGLSSPVTKSFNR
GEC
SEQ ID NO: 678
4A9
CAGTCTGTGCTGACGCAGCCGCCCTCAGTGTCTGGGGCCCCAGGACAGAGGGTCACCATCTCCTGC
ACTGGGAGCAGCTCCAACATCGGGACAGGTTATGCTGTACACTGGTACCAGCAGTTTCCAGGAACA
GCCCCCAAACTCCTCATCTATGGTAACAACAATCGGCCCTCAGGGGTTCCTGACCGATTCTCTGGCT
CCAAGTCTGGCACCTCAGCCTCCCTGGCCATCACTGGGCTCCAGGCTGAGGATGAGGCTGATTATT
ACTGCCAGTCCTATGACAGCAGACTGAGTGGTTGGGTGTTCGGCGGAGGGACCAAGCTGACCGTCC
TAGGTCAGCCCAAGGCCAACCCCACTGTCACTCTGTTCCCGCCCTCCTCTGAGGAGCTCCAAGCCA
ACAAGGCCACACTAGTGTGTCTGATCAGTGACTTCTACCCGGGAGCTGTGACAGTGGCCTGGAAGG
CAGATGGCAGCCCCGTCAAGGCGGGAGTGGAGACCACCAAACCCTCCAAACAGAGCAACAACAAG
TACGCGGCCAGCAGCTACCTGAGCCTGACGCCCGAGCAGTGGAAGTCCCACAGAAGCTACAGCTG
CCAGGTCACGCATGAAGGGAGCACCGTGGAGAAGACAGTGGCCCCTACAGAATGTTCATGA
SEQ ID NO: 679
QSVLTQPPSVSGAPGQRVTISCTGSSSNIGTGYAVHWYQQFPGTAPKLLIYGNNNRPSGVPDRFSGSKSG
TSASLAITGLQAEDEADYYCQSYDSRLSGWVFGGGTKLTVLGQPKANPTVTLFPPSSEELQANKATLVC
LISDFYPGAVTVAWKADGSPVKAGVETTKPSKQSNNKYAASSYLSLTPEQWKSHRSYSCQVTHEGSTV
EKTVAPTECS
SEQ ID NO: 680
4B10
GAAATTGTATTGACGCAGTCTCCAGGCACCCTGTCTTTGTCTCCAGGGGAAAGAGCCACCCTCTCCT
GCAGGGCCAGTCAGAGTGTTAGCAACACCTACTTAGCCTGGTACCATCAGAGACCTGGCCAGGCTC
CCAGGCTCCTCATCTATGGTGCATCCAGCAGGGCCACTGGCATCCCAGACAGATTCAGTGGCAGTG
GGTCTGGGACAGACTTCGCTCTCACCATCAGCAGTCTGGAGCCTGAAGATTTTGCAGTGTATTACT
GTCAGCAGTACAGTAACTCGTGGACGTTCGGCCAAGGGACCAAGGTGGAAATCAAACGAACTGTG
GCTGCACCATCTGTCTTCATCTTCCCGCCATCTGATGAGCAGTTGAAATCTGGAACTGCCTCTGTTG
TGTGCCTGCTGAATAACTTCTATCCCAGAGAGGCCAAAGTACAGTGGAAGGTGGATAACGCCCTCC
AATCGGGTAACTCCCAGGAGAGTGTCACAGAGCAGGACAGCAAGGACAGCACCTACAGCCTCAGC
AGCACCCTGACGCTGAGCAAAGCAGACTACGAGAAACACAAAGTCTACGCCTGCGAAGTCACCCA
TCAGGGCCTGAGCTCGCCCGTCACAAAGAGCTTCAACAGGGGAGAGTGTTGA
SEQ ID NO: 681
EIVLTQSPGTLSLSPGERATLSCRASQSVSNTYLAWYHQRPGQAPRLLIYGASSRATGIPDRFSGSGSGTD
FALTISSLEPEDFAVYYCQQYSNSWTFGQGTKVEIKRTVAAPSVFIFPPSDEQLKSGTASVVCLLNNFYP
REAKVQWKVDNALQSGNSQESVTEQDSKDSTYSLSSTLTLSKADYEKHKVYACEVTHQGLSSPVTKSF
NRGEC
SEQ ID NO: 682
4F3
GAAATTGTGTTGACGCAGTCTCCAGGCACCCTGTCTTTGTCTCCAGGGGAAAGAGCCACCCTCTCCT
GCAGGGCCAGTCAGAGTGTTAGCAGCAGCTACTTAGCCTGGTACCAGCAGAAACCTGGCCAGGCT
CCCAGGCTCCTCATCTATGGTGCATCCAGCAGGGCCACTGGCATCCCAGACAGGTTCAGTGGCAGT
GGGTCTGGGACAGACTTCACTCTCACCATCAGCAGACTGGAACCTGAGGATTTTGCAGTGTATTAC
TGTCAGCAGTATGGTAGCTCGTGGACGTTCGGCCAAGGGACCAAGGTGGAAATCAAACGTACGGT
GGCTGCACCATCTGTCTTCATCTTCCCGCCATCTGATGAGCAGTTGAAATCTGGAACTGCCTCTGTT
GTGTGCCTGCTGAATAACTTCTATCCCAGAGAGGCCAAAGTACAGTGGAAGGTGGATAACGCCCTC
CAATCGGGTAACTCCCAGGAGAGTGTCACAGAGCAGGACAGCAAGGACAGCACCTACAGCCTCAG
CAGCACCCTGACGCTGAGCAAAGCAGACTACGAGAAACACAAAGTCTACGCCTGCGAAGTCACCC
ATCAGGGCCTGAGCTCGCCCGTCACAAAGAGCTTCAACAGGGGAGAGTGTTGA
SEQ ID NO: 683
EIVLTQSPGTLSLSPGERATLSCRASQSVSSSYLAWYQQKPGQAPRLLIYGASSRATGIPDRFSGSGSGTD
FTLTISRLEPEDFAVYYCQQYGSSWTFGQGTKVEIKRTVAAPSVFIFPPSDEQLKSGTASVVCLLNNFYP
REAKVQWKVDNALQSGNSQESVTEQDSKDSTYSLSSTLTLSKADYEKHKVYACEVTHQGLSSPVTKSF
NRGEC
SEQ ID NO: 684
4F7
CAGTCTGTGCTGACGCAGCCGCCCTCAGTGTCTGGGGCCCCAGGGCAGAGGGTCACCATCTCCTGC
ACTGGGAGCAGCTCCAATATCGGGACAGGTTATGATGTACACTGGTATCAGCAGCTTCCAGGAACA
GCCCCCAAACTCCTCATCCATGGTAACAGCAATCGGCCCTCAGGGGTCCCTGACCGATTCTCTGGC
TCCAAGTCTGGCACCTCAGCCTCCCTGGCCATCACTGGGCTCCAGGCTGAGGATGAGGCTGATTAT
TACTGCCAGTCCTATGACAGCAGTCTGAGTGGTTGGGTGTTCGGCGGAGGGACCAGGTTGACCGTC
CTAGGTCAGCCCAAGGCCAACCCCACTGTCACTCTGTTCCCGCCCTCCTCTGAGGAGCTCCAAGCC
AACAAGGCCACACTAGTGTGTCTGATCAGTGACTTCTACCCGGGAGCTGTGACAGTGGCCTGGAAG
GCAGATGGCAGCCCCGTCAAGGCGGGAGTGGAGACCACCAAACCCTCCAAACAGAGCAACAACAA
GTACGCGGCCAGCAGCTACCTGAGCCTGACGCCCGAGCAGTGGAAGTCCCACAGAAGCTACAGCT
GCCAGGTCACGCATGAAGGGAGCACCGTGGAGAAGACAGTGGCCCCTACAGAATGTTCATGA
SEQ ID NO: 685
QSVLTQPPSVSGAPGQRVTISCTGSSSNIGTGYDVHWYQQLPGTAPKLLIHGNSNRPSGVPDRFSGSKSG
TSASLAITGLQAEDEADYYCQSYDSSLSGWVFGGGTRLTVLGQPKANPTVTLFPPSSEELQANKATLVC
LISDFYPGAVTVAWKADGSPVKAGVETTKPSKQSNNKYAASSYLSLTPEQWKSHRSYSCQVTHEGSTV
EKTVAPTECS
SEQ ID NO: 686
16A4
GAAATTGTGTTGACGCAGTCTCCAGGCACCCTGTCTTTGTCTCCAGGGGAAAGAGCCACCCTCTCCT
GCAGGGCCAGTCAGAGTGTTAGCAGCAGTTATTTAGCCTGGTACCAGCAGAAACCTGGCCAGGCTC
CCAGGCTCCTCATCTATGGTACATCCAGCAGGGCCACTGGCATCCCAGACAGGTTCAGTGGCAGTG
GGTCTGGGACAGACTTCACTCTCACCATCAGCAGACTGGAGCCTGAAGATTTTGCAGTGTATTATT
GTCAGCAGTACGGTAGCTCACCTTTCACTTTCGGCGGAGGGACCAAGGTGGAGATCAAACGAACTG
TGGCTGCACCATCTGTCTTCATCTTCCCGCCATCTGATGAGCAGTTGAAATCTGGTACCGCCTCTGT
TGTGTGCCTGCTGAATAACTTCTATCCCAGAGAGGCCAAAGTACAGTGGAAGGTGGATAACGCCCT
CCAATCGGGTAACTCCCAGGAGAGTGTCACAGAGCAGGACAGCAAGGACAGCACCTACAGCCTCA
GCAGCACCCTGACGCTGAGCAAAGCAGACTACGAGAAACACAAAGTCTACGCCTGCGAAGTCACC
CATCAGGGCCTGAGCTCGCCCGTCACAAAGAGCTTCAACAGGGGAGAGTGTTGA
SEQ ID NO: 687
EIVLTQSPGTLSLSPGERATLSCRASQSVSSSYLAWYQQKPGQAPRLLIYGTSSRATGIPDRFSGSGSGTD
FTLTISRLEPEDFAVYYCQQYGSSPFTFGGGTKVEIKRTVAAPSVFIFPPSDEQLKSGTASVVCLLNNFYP
REAKVQWKVDNALQSGNSQESVTEQDSKDSTYSLSSTLTLSKADYEKHKVYACEVTHQGLSSPVTKSF
NRGEC
SEQ ID NO: 688
16C1
GAAATTGTGTTGACGCAGTCTCCAGGCACCCTGTCTTTGTCTCCAGGGGAAAGAGCCACCCTCTCCT
GCAGGGCCAGCCAGAGTGTTAGCAGCAGCTACTTAGCCTGGTACCAGCAGAAACCTGGCCAGGCT
CCCAGGCTCCTCATCTTTGGTGCATCCAGCAGGGCCACTGGCATCCCAGACAGGTTCAGTGGCAGT
GGGTCTGGGACAGACTTCACTCTCACCATCAGCGGACTGGAGCCTGAAGATTTTGCAGTGTATCAC
TGTCAGCAGTATGGTAACTCACCGCTCACTTTCGGCGGAGGGACCAAGGTGGAGATCAAACGAACT
GTGGCTGCACCATCTGTCTTCATCTTCCCGCCATCTGATGAGCAGTTGAAATCTGGTACCGCCTCTG
TTGTGTGCCTGCTGAATAACTTCTATCCCAGAGAGGCCAAAGTACAGTGGAAGGTGGATAACGCCC
TCCAATCGGGTAACTCCCAGGAGAGTGTCACAGAGCAGGACAGCAAGGACAGCACCTACAGCCTC
AGCAGCACCCTGACGCTGAGCAAAGCAGACTACGAGAAACACAAAGTCTACGCCTGCGAAGTCAC
CCATCAGGGCCTGAGCTCGCCCGTCACAAAGAGCTTCAACAGGGGAGAGTGTTGA
SEQ ID NO: 689
EIVLTQSPGTLSLSPGERATLSCRASQSVSSSYLAWYQQKPGQAPRLLIFGASSRATGIPDRFSGSGSGTD
FTLTISGLEPEDFAVYHCQQYGNSPLTFGGGTKVEIKRTVAAPSVFIFPPSDEQLKSGTASVVCLLNNFYP
REAKVQWKVDNALQSGNSQESVTEQDSKDSTYSLSSTLTLSKADYEKHKVYACEVTHQGLSSPVTKSF
NRGEC
SEQ ID NO: 690
17H8
GACATTGTATTGACGCAGTCTCCAGGCACCCTGTCTTTGTCTCCAGGGGAAAGAGCCACCCTCTCCT
GCAGGGCCAGTCAGAGTGTTGCCGGCAGCTACCTAGCCTGGTACCAGCAGAAACCTGGCCAGGCT
CCCAGGCTCCTCATCTCTGGTGCATCCAGCAGGGCCACTGGCATCCCAGACAGGTTCAGTGGCAGT
GGGTCTGGGACAGACTTCACTCTCACCATCAGCAGACTGGAGCCTGAAGATTTTGCAGTGTATTAC
TGTCAGCAGTATGGTAAATCACCGATCACCTTCGGCCAAGGGACACGACTGGAGATGAAAGGAAC
TGTGGCTGCACCATCTGTCTTCATCTTCCCGCCATCTGATGAGCAGTTGAAATCTGGTACCGCCTCT
GTTGTGTGCCTGCTGAATAACTTCTATCCCAGAGAGGCCAAAGTACAGTGGAAGGTGGATAACGCC
CTCCAATCGGGTAACTCCCAGGAGAGTGTCACAGAGCAGGACAGCAAGGACAGCACCTACAGCCT
CAGCAGCACCCTGACGCTGAGCAAAGCAGACTACGAGAAACACAAAGTCTACGCCTGCGAAGTCA
CCCATCAGGGCCTGAGCTCGCCCGTCACAAAGAGCTTCAACAGGGGAGAGTGTTGA
SEQ ID NO: 691
DIVLTQSPGTLSLSPGERATLSCRASQSVAGSYLAWYQQKPGQAPRLLISGASSRATGIPDRFSGSGSGT
DFTLTISRLEPEDFAVYYCQQYGKSPITFGQGTRLEMKGTVAAPSVFIFPPSDEQLKSGTASVVCLLNNF
YPREAKVQWKVDNALQSGNSQESVTEQDSKDSTYSLSSTLTLSKADYEKHKVYACEVTHQGLSSPVTK
SFNRGEC
SEQ ID NO: 692
19B5
CAGTCTGCGCTGACTCAGCCACCCTCAACGACTGGGACCCCCGGGCAGAGGGTCACCATCTCTTGT
TCTGGAAGCAGGTCCAACATCGGAAGCAATTTTGTAAACTGGTACAAGCAGCTCCCAGGAACGGC
CCCCAAAGTCCTCATCTATACTAATAATCAGCGGCCCTCAGGGGTCCCTGACCGATTCTCTGGCTCC
AAGTCTGGCACCTCAGCCTCCCTGGCCATCAGTGGGCTCCAGTCTGAGGATGAGTCTGATTATTACT
GCGCAACATGGGATGACAGTATGAATGGTTGGGTGTTCGGCGGAGGGACCAAACTGACCGTCCTA
GGTCAGCCCAAGGCTGCCCCCTCGGTCACTCTGTTCCCACCCTCCTCTGAGGAGCTTCAAGCCAAC
AAGGCCACACTGGTGTGTCTCATAAGTGACTTCTACCCGGGAGCCGTGACAGTGGCCTGGAAGGCA
GATAGCAGCCCCGTCAAGGCGGGAGTGGAGACCACCACACCCTCCAAACAAAGCAACAACAAGTA
CGCGGCCAGCAGCTATCTGAGCCTGACGCCTGAGCAGTGGAAGTCCCACAGAAGCTACAGCTGCC
AGGTCACGCATGAAGGGAGCACCGTGGAGAAGACAGTGGCCCCTACAGAATGTTCATGA
SEQ ID NO: 693
QSALTQPPSTTGTPGQRVTISCSGSRSNIGSNFVNWYKQLPGTAPKVLIYTNNQRPSGVPDRFSGSKSGTS
ASLAISGLQSEDESDYYCATWDDSMNGWVFGGGTKLTVLGQPKAAPSVTLFPPSSEELQANKATLVCLI
SDFYPGAVTVAWKADSSPVKAGVETTTPSKQSNNKYAASSYLSLTPEQWKSHRSYSCQVTHEGSTVEK
TVAPTECS
SEQ ID NO: 694
20D3
CAGTCTGCGCTGACTCAGCCACCCTCAGCGACTGGGACCCCCGGGCAGAGGGTCACCATCTCTTGT
TCTGGAAGCAGCTCCAACATCGGAAGCAATTTTGTAAACTGGTACAAGCAGCTCCCAGGAACGGCC
CCCAAAGTCCTCATCTATACTAATAATCAGCGGCCCTCAGGGGTCCCTGACCGATTCTCTGGCTCCA
AGTCTGGCACCTCAGCCTCCCTGGCCATCAGTGGGCTCCAGTCTGAGGATGAGTCTGATTATTACTG
TGCAACATGGGATGACAGCCTGAATGGTTGGGTGTTCGGCGGAGGGACCAAGCTGACCGTCCTAG
GTCAGCCCAAGGCTGCCCCCTCGGTCACTCTGTTCCCACCCTCCTCTGAGGAGCTTCAAGCCAACA
AGGCCACACTGGTGTGTCTCATAAGTGACTTCTACCCGGGAGCCGTGACAGTGGCCTGGAAGGCAG
ATAGCAGCCCCGTCAAGGCGGGAGTGGAGACCACCACACCCTCCAAACAAAGCAACAACAAGTAC
GCGGCCAGCAGCTATCTGAGCCTGACGCCTGAGCAGTGGAAGTCCCACAGAAGCTACAGCTGCCA
GGTCACGCATGAAGGGAGCACCGTGGAGAAGACAGTGGCCCCTACAGAATGTTCATGA
SEQ ID NO: 695
QSALTQPPSATGTPGQRVTISCSGSSSNIGSNFVNWYKQLPGTAPKVLIYTNNQRPSGVPDRFSGSKSGTS
ASLAISGLQSEDESDYYCATWDDSLNGWVFGGGTKLTVLGQPKAAPSVTLFPPSSEELQANKATLVCLI
SDFYPGAVTVAWKADSSPVKAGVETTTPSKQSNNKYAASSYLSLTPEQWKSHRSYSCQVTHEGSTVEK
TVAPTECS
SEQ ID NO: 696
22D1
CAGTCTGCGCTGACTCAGCCACCCTCAGCGACTGGGACCCCCGGGCAGAGGGTCACCATCTCTTGT
TCTGGAAGCAGCTCCAACATCGGAAGCAATTTTGTAAACTGGTACAAGCAGCTCCCAGGAACGGCC
CCCAAAGTCCTCATCTATACTAATAATCAGCGGCCCTCAGGGGTCCCTGACCGATTCTCTGGCTCCA
AGTCTGGCACCTCAGCCTCCCTGGCCATCAGTGGGCTCCAGTCTGAGGATGAGTCTGATTATTACTG
TGCAACATGGGATGACAGTATGAATGGTTGGGTGTTCGGCGGAGGGACCAAGCTGACCGTCCTAG
GTCAGCCCAAGGCTGCCCCCTCGGTCACTCTGTTCCCACCCTCCTCTGAGGAGCTTCAAGCCAACA
AGGCCACACTGGTGTGTCTCATAAGTGACTTCTACCCGGGAGCCGTGACAGTGGCCTGGAAGGCAG
ATAGCAGCCCCGTCAAGGCGGGAGTGGAGACCACCACACCCTCCAAACAAAGCAACAACAAGTAC
GCGGCCAGCAGCTATCTGAGCCTGACGCCTGAGCAGTGGAAGTCCCACAGAAGCTACAGCTGCCA
GGTCACGCATGAAGGGAGCACCGTGGAGAAGACAGTGGCCCCTACAGAATGTTCATGA
SEQ ID NO: 697
QSALTQPPSATGTPGQRVTISCSGSSSNIGSNFVNWYKQLPGTAPKVLIYTNNQRPSGVPDRFSGSKSGTS
ASLAISGLQSEDESDYYCATWDDSMNGWVFGGGTKLTVLGQPKAAPSVTLFPPSSEELQANKATLVCLI
SDFYPGAVTVAWKADSSPVKAGVETTTPSKQSNNKYAASSYLSLTPEQWKSHRSYSCQVTHEGSTVEK
TVAPTECS
SEQ ID NO: 698
22G10
GAAATAGTGATGACGCAGTCTCCAGTCACCCTGTCTCTGTCTCTAGGGGAAAGAGCCACCCTCTCC
TGCAGGGCCAGTCAGAGTATTAGCAGCAACTTAGCCTGGTTCCAGCAGAAACCTGGCCAGGCTCCC
AGACTCCTCATCTATGGTGCATTTACCAGGGCCACTGGTATCCCAGCCAGGGTCAGTGGCAGTGGG
TCTGGGACAGAGTTCACTCTCACCATCAGCAGCCTGCAGTCTGAAGATTTTGCAGTTTATTACTGTC
AGCAGTATAATTACTGGCCGCTCACTTTCGGCGGAGGGACCAAGGTGGAGATCAAGCGAACTGTG
GCTGCACCATCTGTCTTCATCTTCCCGCCATCTGATGAGCAGTTGAAATCTGGTACCGCCTCTGTTG
TGTGCCTGCTGAATAACTTCTATCCCAGAGAGGCCAAAGTACAGTGGAAGGTGGATAACGCCCTCC
AATCGGGTAACTCCCAGGAGAGTGTCACAGAGCAGGACAGCAAGGACAGCACCTACAGCCTCAGC
AGCACCCTGACGCTGAGCAAAGCAGACTACGAGAAACACAAAGTCTACGCCTGCGAAGTCACCCA
TCAGGGCCTGAGCTCGCCCGTCACAAAGAGCTTCAACAGGGGAGAGTGTTGA
SEQ ID NO: 699
EIVMTQSPVTLSLSLGERATLSCRASQSISSNLAWFQQKPGQAPRLLIYGAFTRATGIPARVSGSGSGTEF
TLTISSLQSEDFAVYYCQQYNYWPLTFGGGTKVEIKRTVAAPSVFIFPPSDEQLKSGTASVVCLLNNFYP
REAKVQWKVDNALQSGNSQESVTEQDSKDSTYSLSSTLTLSKADYEKHKVYACEVTHQGLSSPVTKSF
NRGEC
SEQ ID NO: 700
23A10
TCCTATGAGCTGACTCAGCCACCCTCAGTGTCCGTGTCCCCAGGACAGACAGCCAGCATCACCTGC
TCTGGAGATAGATTGGGGGAGAAATATGTTTGCTGGTATCAGCAGAAGCCAGGCCAGTCCCCTATA
CTGGTCATCTATCAAGATAATAAGTGGCCCTCAGGGATCCCTGAGCGATTCTCTGGCTCCAACTCTG
GGAACACAGCCACTCTGACCATCAGCGGGACCCAGGCTATGGATGAGGCTGACTATTACTGTCAGG
CGTGGGACAGCAGCACTGTGGTATTCGGCGGGGGGACCAAGCTGACCGTCCTAGGTCAGCCCAAG
GCTGCCCCCTCGGTCACTCTGTTCCCACCCTCCTCTGAGGAGCTTCAAGCCAACAAGGCCACACTG
GTGTGTCTCATAAGTGACTTCTACCCGGGAGCCGTGACAGTGGCCTGGAAGGCAGATAGCAGCCCC
GTCAAGGCGGGAGTGGAGACCACCACACCCTCCAAACAAAGCAACAACAAGTACGCGGCCAGCAG
CTATCTGAGCCTGACGCCTGAGCAGTGGAAGTCCCACAGAAGCTACAGCTGCCAGGTCACGCATGA
AGGGAGCACCGTGGAGAAGACAGTGGCCCCTACAGAATGTTCATGA
SEQ ID NO: 701
SYELTQPPSVSVSPGQTASITCSGDRLGEKYVCWYQQKPGQSPILVIYQDNKWPSGIPERFSGSNSGNTA
TLTISGTQAMDEADYYCQAWDSSTVVFGGGTKLTVLGQPKAAPSVTLFPPSSEELQANKATLVCLISDF
YPGAVTVAWKADSSPVKAGVETTTPSKQSNNKYAASSYLSLTPEQWKSHRSYSCQVTHEGSTVEKTV
APTECS
SEQ ID NO: 702
25F8
CAGTCTGCGCTGACTCAGCCACCCTCAGCGACTGGGACCCCCGGGCAGAGGGTCACCATCTCTTGT
TCTGGAAGCAGCTCCAACATCGGAAGGAATTTTGTAAACTGGTATAAGCAGCTCCCAGGAACGGCC
CCCAAAGTCCTCATTTATACTAATAATCAGCGGCCCTCAGGGGTCCCTGACCGATTCTCTGGCTCCA
AGTCTGGCACCTCAGCCTCCCTGGCCATCAGTGGGCTCCAGTCTGAGGATGAGTCTGATTATTACTG
TGCAGCATGGGATGACAGCCTGAATGGTTGGGTGTTCGGCGGAGGGACCAAGCTGACCGTCCTAG
GTCAGCCCAAGGCTGCCCCCTCGGTCACTCTGTTCCCACCCTCCTCTGAGGAGCTTCAAGCCAACA
AGGCCACACTGGTGTGTCTCATAAGTGACTTCTACCCGGGAGCCGTGACAGTGGCCTGGAAGGCAG
ATAGCAGCCCCGTCAAGGCGGGAGTGGAGACCACCACACCCTCCAAACAAAGCAACAACAAGTAC
GCGGCCAGCAGCTATCTGAGCCTGACGCCTGAGCAGTGGAAGTCCCACAGAAGCTACAGCTGCCA
GGTCACGCATGAAGGGAGCACCGTGGAGAAGACAGTGGCCCCTACAGAATGTTCATGA
SEQ ID NO: 703
QSALTQPPSATGTPGQRVTISCSGSSSNIGRNFVNWYKQLPGTAPKVLIYTNNQRPSGVPDRFSGSKSGT
SASLAISGLQSEDESDYYCAAWDDSLNGWVFGGGTKLTVLGQPKAAPSVTLFPPSSEELQANKATLVC
LISDFYPGAVTVAWKADSSPVKAGVETTTPSKQSNNKYAASSYLSLTPEQWKSHRSYSCQVTHEGSTV
EKTVAPTECS
SEQ ID NO: 704
25G10
GAAATTGTGTTGACGCAGTCTCCAGGCACCCTGTCTTTGTCTCCAGGGGAAAGAGCCACCCTCTCCT
GCAGGGCCAGTCAGAGTGTTAGCAGCAGCTACTTAGCCTGGTACCAGCAGAAACCTGGCCAGGCT
CCCAGGCTCCTCATCTTTGGTGCATCCAGCAGGGCCACTGGCATCCCAGACAGGTTCAGTGGCAGT
GGGTCTGGGACAGACTTCACTCTCACCATCAGCAGACTGGAGCCTGAAGATTTTGCAGTGTATCAC
TGTCAGCAGTATGGTAACTCACCGCTCACTTTCGGCGGAGGGACCAAGGTGGAGATCAAACGAACT
GTGGCTGCACCATCTGTCTTCATCTTCCCGCCATCTGATGAGCAGTTGAAATCTGGTACCGCCTCTG
TTGTGTGCCTGCTGAATAACTTCTATCCCAGAGAGGCCAAAGTACAGTGGAAGGTGGATAACGCCC
TCCAATCGGGTAACTCCCAGGAGAGTGTCACAGAGCAGGACAGCAAGGACAGCACCTACAGCCTC
AGCAGCACCCTGACGCTGAGCAAAGCAGACTACGAGAAACACAAAGTCTACGCCTGCGAAGTCAC
CCATCAGGGCCTGAGCTCGCCCGTCACAAAGAGCTTCAACAGGGGAGAGTGTTGA
SEQ ID NO: 705
EIVLTQSPGTLSLSPGERATLSCRASQSVSSSYLAWYQQKPGQAPRLLIFGASSRATGIPDRFSGSGSGTD
FTLTISRLEPEDFAVYHCQQYGNSPLTFGGGTKVEIKRTVAAPSVFIFPPSDEQLKSGTASVVCLLNNFYP
REAKVQWKVDNALQSGNSQESVTEQDSKDSTYSLSSTLTLSKADYEKHKVYACEVTHQGLSSPVTKSF
NRGEC
SEQ ID NO: 706
26D1
CACTCTGTGCTGACTCAGTCACCCTCAGCGTCTGGGACCCCCGGACAGAGGGTCACCATCTCTTGTT
CTGGAAGCCGCTCCAACATCGGAAGTAATTTTGTAAACTGGTACCAGCAGCTCCCAGGAACGGCCC
CCAAACTCCTCATCTATACTAATAATCAGCGGCCCTCAGGGGTCCCTGACCGATTCTCTGGCTCCAA
GTCTGGCACCTCAGCCTCCCTGGCCATCAGTGGGCTCCAGTCTGAGGATGAGGCTGATTATTACTGT
GCAGTATGGGATGACAGCCTGAATGGTTGGGTGTTCGGCGGAGGGACCAAGCTGACCGTCCTAGG
TCAGCCCAAGGCTGCCCCCTCGGTCACTCTGTTCCCACCCTCCTCTGAGGAGCTTCAAGCCAACAA
GGCCACACTGGTGTGTCTCATAAGTGACTTCTACCCGGGAGCCGTGACAGTGGCCTGGAAGGCAGA
TAGCAGCCCCGTCAAGGCGGGAGTGGAGACCACCACACCCTCCAAACAAAGCAACAACAAGTACG
CGGCCAGCAGCTATCTGAGCCTGACGCCTGAGCAGTGGAAGTCCCACAGAAGCTACAGCTGCCAG
GTCACGCATGAAGGGAGCACCGTGGAGAAGACAGTGGCCCCTACAGAATGTTCATGA
SEQ ID NO: 707
HSVLTQSPSASGTPGQRVTISCSGSRSNIGSNFVNWYQQLPGTAPKLLIYTNNQRPSGVPDRFSGSKSGTS
ASLAISGLQSEDEADYYCAVWDDSLNGWVFGGGTKLTVLGQPKAAPSVTLFPPSSEELQANKATLVCLI
SDFYPGAVTVAWKADSSPVKAGVETTTPSKQSNNKYAASSYLSLTPEQWKSHRSYSCQVTHEGSTVEK
TVAPTECS
SEQ ID NO: 708
26F12
CAGTCTGTGCTGACTCAGTCACCCTCAGCGTCTGGGACCCCCGGGCAGAAGGTCACCATCTCTTGTT
CTGGAAGCCGCTCCAACATCGGAAGTAATTTTGTAAACTGGTACCAGCAGCTCCCAGGAACGGCCC
CCAAACTCCTCATCTATACTAATTATCAGCGGCCCTCAGGGGTCCCTGACCGATTCTCTGGCTCCAA
GTCTGGCACCTCAGCCTCCCTGGCCATCAGTGGGCTCCAGTCTGAGGATGAGGCTGATTATTACTGT
GCAGTATGGGATGACAGCCTGAATGGTTGGGTGTTCGGCGGAGGGACCAAGCTGACCGTCCTAGG
TCAGCCCAAGGCTGCCCCCTCGGTCACTCTGTTCCCACCCTCCTCTGAGGAGCTTCAAGCCAACAA
GGCCACACTGGTGTGTCTCATAAGTGACTTCTACCCGGGAGCCGTGACAGTGGCCTGGAAGGCAGA
TAGCAGCCCCGTCAAGGCGGGAGTGGAGACCACCACACCCTCCAAACAAAGCAACAACAAGTACG
CGGCCAGCAGCTATCTGAGCCTGACGCCTGAGCAGTGGAAGTCCCACAGAAGCTACAGCTGCCAG
GTCACGCATGAAGGGAGCACCGTGGAGAAGACAGTGGCCCCTACAGAATGTTCATGA
SEQ ID NO: 709
QSVLTQSPSASGTPGQKVTISCSGSRSNIGSNFVNWYQQLPGTAPKLLIYTNYQRPSGVPDRFSGSKSGTS
ASLAISGLQSEDEADYYCAVWDDSLNGWVFGGGTKLTVLGQPKAAPSVTLFPPSSEELQANKATLVCLI
SDFYPGAVTVAWKADSSPVKAGVETTTPSKQSNNKYAASSYLSLTPEQWKSHRSYSCQVTHEGSTVEK
TVAPTECS
SEQ ID NO: 710

TABLE IIIc
Heavy Chain Variable and Contant Region Polynucleotide and Amino acid Sequences

13586_HC [hu anti-<huCDH19> 4F3 VH]::huI2g1z
QVQLVESGGGVVQPGRSLRLSCAASGFSFSSYDMDWVRQTPGKGLEWVAVIWYDGSNKYYADSVRG
RFTISRDNSKNTLFLQMNSLRVEDTAVYYCARETGEGWYFDLWGRGTLVTVSSASTKGPSVFPLAPSSK
STSGGTAALGCLVKDYFPEPVTVSWNSGALTSGVHTFPAVLQSSGLYSLSSVVTVPSSSLGTQTYICNVN
HKPSNTKVDKKVEPKSCDKTHTCPPCPAPELLGGPSVFLFPPKPKDTLMISRTPEVTCVVVDVSHEDPEV
KFNWYVDGVEVHNAKTKPREEQYNSTYRVVSVLTVLHQDWLNGKEYKCKVSNKALPAPIEKTISKAK
GQPREPQVYTLPPSREEMTKNQVSLTCLVKGFYPSDIAVEWESNGQPENNYKTTPPVLDSDGSFFLYSK
LTVDKSRWQQGNVFSCSVMHEALHNHYTQKSLSLSPGK
SEQ ID NO: 711
13589_HC [hu anti-<huCDH19> 4A9 VH]::huIgG1z
QVQLQESGPGLVKPSETLSLTCTVSGGSISGYYWSWIRQPPGKGLEWFAYFSYSGSTNYNPSLKSRVTLS
VDTSKNQFSLKLSSVTAADTAVYYCARNWAFHFDFWGQGTLVTVSSASTKGPSVFPLAPSSKSTSGGT
AALGCLVKDYFPEPVTVSWNSGALTSGVHTFPAVLQSSGLYSLSSVVTVPSSSLGTQTYICNVNHKPSN
TKVDKKVEPKSCDKTHTCPPCPAPELLGGPSVFLFPPKPKDTLMISRTPEVTCVVVDVSHEDPEVKFNW
YVDGVEVHNAKTKPREEQYNSTYRVVSVLTVLHQDWLNGKEYKCKVSNKALPAPIEKTISKAKGQPR
EPQVYTLPPSREEMTKNQVSLTCLVKGFYPSDIAVEWESNGQPENNYKTTPPVLDSDGSFFLYSKLTVD
KSRWQQGNVFSCSVMHEALHNHYTQKSLSLSPGK
SEQ ID NO: 712
13590_HC [hu anti-<huCDH19> 4B10 VH]::huIgG1z
QVQLVESGGGVVQPGRSLRLSCAASGFTFSSYDMHWVRQAPGKGLEWVAVISYDGTNEYYADSVKGR
FTISRDTSKNTLYLQMNSLRAEDTAVYYCARERYFDWSFDYWGQGTLVSVSSASTKGPSVFPLAPSSKS
TSGGTAALGCLVKDYFPEPVTVSWNSGALTSGVHTFPAVLQSSGLYSLSSVVTVPSSSLGTQTYICNVN
HKPSNTKVDKKVEPKSCDKTHTCPPCPAPELLGGPSVFLFPPKPKDTLMISRTPEVTCVVVDVSHEDPEV
KFNWYVDGVEVHNAKTKPREEQYNSTYRVVSVLTVLHQDWLNGKEYKCKVSNKALPAPIEKTISKAK
GQPREPQVYTLPPSREEMTKNQVSLTCLVKGFYPSDIAVEWESNGQPENNYKTTPPVLDSDGSFFLYSK
LTVDKSRWQQGNVFSCSVMHEALHNHYTQKSLSLSPGK
SEQ ID NO: 713
13874_HC [hu anti-<huCDH19> 17H8.2 VH]::huIgG1z
QVQLQESGPGLVKPSETLSLTCTVSGGSINSYYWSWIRQPPGKGLEWIGYIYYIGSTNYNPSLKSRVTISV
DTSKNQFSLKLSSVTAADTALYYCARDSRYRSGWYDAFDIWGQGTMVTVSSASTKGPSVFPLAPSSKS
TSGGTAALGCLVKDYFPEPVTVSWNSGALTSGVHTFPAVLQSSGLYSLSSVVTVPSSSLGTQTYICNVN
HKPSNTKVDKKVEPKSCDKTHTCPPCPAPELLGGPSVFLFPPKPKDTLMISRTPEVTCVVVDVSHEDPEV
KFNWYVDGVEVHNAKTKPREEQYNSTYRVVSVLTVLHQDWLNGKEYKCKVSNKALPAPIEKTISKAK
GQPREPQVYTLPPSREEMTKNQVSLTCLVKGFYPSDIAVEWESNGQPENNYKTTPPVLDSDGSFFLYSK
LTVDKSRWQQGNVFSCSVMHEALHNHYTQKSLSLSPGK
SEQ ID NO: 714
13875_HC [hu anti-<huCDH19> 16C1.1 VH]::huIgG1z
QVQLQESGPGLVKPSETLSLTCTVSGGSISGYYWSWIRQPPGKGLEWIGYIYYIGSTNYNPSLKSRVTMS
IDTSKNQFSLTLSSLTAADTAVYFCARDGSSGWYRWFDPWGQGTLVTVSSASTKGPSVFPLAPSSKSTS
GGTAALGCLVKDYFPEPVTVSWNSGALTSGVHTFPAVLQSSGLYSLSSVVTVPSSSLGTQTYICNVNHK
PSNTKVDKKVEPKSCDKTHTCPPCPAPELLGGPSVFLFPPKPKDTLMISRTPEVTCVVVDVSHEDPEVKF
NWYVDGVEVHNAKTKPREEQYNSTYRVVSVLTVLHQDWLNGKEYKCKVSNKALPAPIEKTISKAKGQ
PREPQVYTLPPSREEMTKNQVSLTCLVKGFYPSDIAVEWESNGQPENNYKTTPPVLDSDGSFFLYSKLT
VDKSRWQQGNVFSCSVMHEALHNHYTQKSLSLSPGK
SEQ ID NO: 715
13876_HC [hu anti-<huCDH19> 16A4.1 VH]::huIgG1z
QVQLQESGPGLAKPSETLSLTCTVSGDSITSYYWSWIRQPPGKGLEWIGYIYYSGSTNYNPSLKSRVTISV
DTSKNQFSLKLSSVTAADTAVYYCARDQRRIAAAGTHFYGMDVWGQGTTVTVSSASTKGPSVFPLAPS
SKSTSGGTAALGCLVKDYFPEPVTVSWNSGALTSGVHTFPAVLQSSGLYSLSSVVTVPSSSLGTQTYICN
VNHKPSNTKVDKKVEPKSCDKTHTCPPCPAPELLGGPSVFLFPPKPKDTLMISRTPEVTCVVVDVSHEDP
EVKFNWYVDGVEVHNAKTKPREEQYNSTYRVVSVLTVLHQDWLNGKEYKCKVSNKALPAPIEKTISK
AKGQPREPQVYTLPPSREEMTKNQVSLTCLVKGFYPSDIAVEWESNGQPENNYKTTPPVLDSDGSFFLY
SKLTVDKSRWQQGNVFSCSVMHEALHNHYTQKSLSLSPGK
SEQ ID NO: 716
13877_HC [hu anti-<huCDH19> 22G10.1 VH]::huIgG1z
EVQLLESGGGLVQPGGSLRLSCAASGFTFSSYAMNWVRQAPGKGLEWVSTISGGGANTYYADSVKGR
FTISSDNSKSTLYLQMNSLRAADTAVYHCAKGGMGGYYYGMDVWGQGTTVTVSSASTKGPSVFPLAP
SSKSTSGGTAALGCLVKDYFPEPVTVSWNSGALTSGVHTFPAVLQSSGLYSLSSVVTVPSSSLGTQTYIC
NVNHKPSNTKVDKKVEPKSCDKTHTCPPCPAPELLGGPSVFLFPPKPKDTLMISRTPEVTCVVVDVSHE
DPEVKFNWYVDGVEVHNAKTKPREEQYNSTYRVVSVLTVLHQDWLNGKEYKCKVSNKALPAPIEKTI
SKAKGQPREPQVYTLPPSREEMTKNQVSLTCLVKGFYPSDIAVEWESNGQPENNYKTTPPVLDSDGSFF
LYSKLTVDKSRWQQGNVFSCSVMHEALHNHYTQKSLSLSPGK
SEQ ID NO: 717
13878_HC [hu anti-<huCDH19> 20D3.1 VH]::huIgG1z
QVQLVQSGAEVKKPGASVKVSCKVSGYTFTSYFIHWVRQAPGQGLEWMGIINPISVSTSYAQKFQGRV
TMTRDTSTSTVFMELSSLRSEDTAVYYCARGGIQLWLHFDYWGQGTLVTVSSASTKGPSVFPLAPSSKS
TSGGTAALGCLVKDYFPEPVTVSWNSGALTSGVHTFPAVLQSSGLYSLSSVVTVPSSSLGTQTYICNVN
HKPSNTKVDKKVEPKSCDKTHTCPPCPAPELLGGPSVFLFPPKPKDTLMISRTPEVTCVVVDVSHEDPEV
KFNWYVDGVEVHNAKTKPREEQYNSTYRVVSVLTVLHQDWLNGKEYKCKVSNKALPAPIEKTISKAK
GQPREPQVYTLPPSREEMTKNQVSLTCLVKGFYPSDIAVEWESNGQPENNYKTTPPVLDSDGSFFLYSK
LTVDKSRWQQGNVFSCSVMHEALHNHYTQKSLSLSPGK
SEQ ID NO: 718
13879_HC [hu anti-<huCDH19> 22D1.1 VH]::huIgG1z
QVQLVQSGAEVKKPGASVRVSCKVSGYTFTSYFIHWVRQAPGQGLEWMGIINPISVSTSYAQKFQGRV
TMTRDTSTSTVFMELSSLRSEDTAVYYCARGGIQLWLHLDYWGQGTLVTVSSASTKGPSVFPLAPSSKS
TSGGTAALGCLVKDYFPEPVTVSWNSGALTSGVHTFPAVLQSSGLYSLSSVVTVPSSSLGTQTYICNVN
HKPSNTKVDKKVEPKSCDKTHTCPPCPAPELLGGPSVFLFPPKPKDTLMISRTPEVTCVVVDVSHEDPEV
KFNWYVDGVEVHNAKTKPREEQYNSTYRVVSVLTVLHQDWLNGKEYKCKVSNKALPAPIEKTISKAK
GQPREPQVYTLPPSREEMTKNQVSLTCLVKGFYPSDIAVEWESNGQPENNYKTTPPVLDSDGSFFLYSK
LTVDKSRWQQGNVFSCSVMHEALHNHYTQKSLSLSPGK
SEQ ID NO: 719
13880_HC [hu anti-<huCDH19> 25F8.1 VH]::huIgG1z
QVQLVQSGAEVKKPGASVKVSCKASGYTFTSYYIHWVRQAPGQGLEWMGIINPSGGSTRYAQKFQGR
VTMTRDTSTSTVFMELSSLRSEDTAVYYCARGGIQLWLHFDYWGQGTLVTVSSASTKGPSVFPLAPSSK
STSGGTAALGCLVKDYFPEPVTVSWNSGALTSGVHTFPAVLQSSGLYSLSSVVTVPSSSLGTQTYICNVN
HKPSNTKVDKKVEPKSCDKTHTCPPCPAPELLGGPSVFLFPPKPKDTLMISRTPEVTCVVVDVSHEDPEV
KFNWYVDGVEVHNAKTKPREEQYNSTYRVVSVLTVLHQDWLNGKEYKCKVSNKALPAPIEKTISKAK
GQPREPQVYTLPPSREEMTKNQVSLTCLVKGFYPSDIAVEWESNGQPENNYKTTPPVLDSDGSFFLYSK
LTVDKSRWQQGNVFSCSVMHEALHNHYTQKSLSLSPGK
SEQ ID NO: 720
13881_HC [hu anti-<huCDH19> 26F12.1 VH]::huIgG1z
QVQLVQSGAEVKKPGASVKVSCKASRYTFTNYYMSWVRQAPGQGLEWMGIINPSGGDSTYAQKFQG
RLTMTGDTSTSTVYMELSSLRSEDTAVYYCARGGIQLWLHFDYWGQGTLVTVSSASTKGPSVFPLAPSS
KSTSGGTAALGCLVKDYFPEPVTVSWNSGALTSGVHTFPAVLQSSGLYSLSSVVTVPSSSLGTQTYICNV
NHKPSNTKVDKKVEPKSCDKTHTCPPCPAPELLGGPSVFLFPPKPKDTLMISRTPEVTCVVVDVSHEDPE
VKFNWYVDGVEVHNAKTKPREEQYNSTYRVVSVLTVLHQDWLNGKEYKCKVSNKALPAPIEKTISKA
KGQPREPQVYTLPPSREEMTKNQVSLTCLVKGFYPSDIAVEWESNGQPENNYKTTPPVLDSDGSFFLYS
KLTVDKSRWQQGNVFSCSVMHEALHNHYTQKSLSLSPGK
SEQ ID NO: 721
13882_HC [hu anti-<huCDH19> 26D1.1 VH]::huIgG1z
QVQLVQSGAEVKKPGASVKVSCKASRYTFTSYYMSWVRQAPGQGLEWMGIIHPSGGDTTYAQKFQGR
VTMTGDTSTSTVYMELSSLRSEDTAVYYCARGGIKLWLHFDYWGQGTLVTVSSASTKGPSVFPLAPSS
KSTSGGTAALGCLVKDYFPEPVTVSWNSGALTSGVHTFPAVLQSSGLYSLSSVVTVPSSSLGTQTYICNV
NHKPSNTKVDKKVEPKSCDKTHTCPPCPAPELLGGPSVFLFPPKPKDTLMISRTPEVTCVVVDVSHEDPE
VKFNWYVDGVEVHNAKTKPREEQYNSTYRVVSVLTVLHQDWLNGKEYKCKVSNKALPAPIEKTISKA
KGQPREPQVYTLPPSREEMTKNQVSLTCLVKGFYPSDIAVEWESNGQPENNYKTTPPVLDSDGSFFLYS
KLTVDKSRWQQGNVFSCSVMHEALHNHYTQKSLSLSPGK
SEQ ID NO: 722
13883_HC [hu anti-<huCDH19> 25G10.1 VH]::huIgG1z
QVQLQESGPGLVKPSETLSLTCTVSGGSISGYYWSWIRQPPGKGLEWIGYIYYIGSTNYNPSLKSRVTMS
VDTSKNQFSLKLSSVTAADTAVYYCARDGSSGWYRWFDPWGQGTLVTVSSASTKGPSVFPLAPSSKST
SGGTAALGCLVKDYFPEPVTVSWNSGALTSGVHTFPAVLQSSGLYSLSSVVTVPSSSLGTQTYICNVNH
KPSNTKVDKKVEPKSCDKTHTCPPCPAPELLGGPSVFLFPPKPKDTLMISRTPEVTCVVVDVSHEDPEVK
FNWYVDGVEVHNAKTKPREEQYNSTYRVVSVLTVLHQDWLNGKEYKCKVSNKALPAPIEKTISKAKG
QPREPQVYTLPPSREEMTKNQVSLTCLVKGFYPSDIAVEWESNGQPENNYKTTPPVLDSDGSFFLYSKL
TVDKSRWQQGNVFSCSVMHEALHNHYTQKSLSLSPGK
SEQ ID NO: 723
13885_HC [hu anti-<huCDH19> 19B5.1 VH]::huIgG1z
QVQLVQSGAEVKKPGASVKVSCKVSGYTFTSYFIHWVRQAPGQGLEWMGIINPISVSTSYAQKFQGRV
TMTRDTSTSTVFMELSSLRSEDTAVYYCARGGIQLWLHLDYWGQGTLVTVSSASTKGPSVFPLAPSSKS
TSGGTAALGCLVKDYFPEPVTVSWNSGALTSGVHTFPAVLQSSGLYSLSSVVTVPSSSLGTQTYICNVN
HKPSNTKVDKKVEPKSCDKTHTCPPCPAPELLGGPSVFLFPPKPKDTLMISRTPEVTCVVVDVSHEDPEV
KFNWYVDGVEVHNAKTKPREEQYNSTYRVVSVLTVLHQDWLNGKEYKCKVSNKALPAPIEKTISKAK
GQPREPQVYTLPPSREEMTKNQVSLTCLVKGFYPSDIAVEWESNGQPENNYKTTPPVLDSDGSFFLYSK
LTVDKSRWQQGNVFSCSVMHEALHNHYTQKSLSLSPGK
SEQ ID NO: 724
14022_HC [hu anti-<huCDH19> 4A2 VH]::huIgG1z
QVQLQESGPGLVKPSQTLSLTCTVSGGSISSSGYYWSWIRQHPGKGLEWIGYIYYTGSAYYNPSLKSRV
TISVDTSKNQFSLKLSSVTAADTAVYYCARDGSSGWYFQYWGQGTLVTVSSASTKGPSVFPLAPSSKST
SGGTAALGCLVKDYFPEPVTVSWNSGALTSGVHTFPAVLQSSGLYSLSSVVTVPSSSLGTQTYICNVNH
KPSNTKVDKKVEPKSCDKTHTCPPCPAPELLGGPSVFLFPPKPKDTLMISRTPEVTCVVVDVSHEDPEVK
FNWYVDGVEVHNAKTKPREEQYNSTYRVVSVLTVLHQDWLNGKEYKCKVSNKALPAPIEKTISKAKG
QPREPQVYTLPPSREEMTKNQVSLTCLVKGFYPSDIAVEWESNGQPENNYKTTPPVLDSDGSFFLYSKL
TVDKSRWQQGNVFSCSVMHEALHNHYTQKSLSLSPGK
SEQ ID NO: 725
14024_HC [hu anti-<huCDH19> 4A2 (1-472)(Q17E,H47P) VH]::huIgG1z
QVQLQESGPGLVKPSETLSLTCTVSGGSISSSGYYWSWIRQPPGKGLEWIGYIYYTGSAYYNPSLKSRVT
ISVDTSKNQFSLKLSSVTAADTAVYYCARDGSSGWYFQYWGQGTLVTVSSASTKGPSVFPLAPSSKSTS
GGTAALGCLVKDYFPEPVTVSWNSGALTSGVHTFPAVLQSSGLYSLSSVVTVPSSSLGTQTYICNVNHK
PSNTKVDKKVEPKSCDKTHTCPPCPAPELLGGPSVFLFPPKPKDTLMISRTPEVTCVVVDVSHEDPEVKF
NWYVDGVEVHNAKTKPREEQYNSTYRVVSVLTVLHQDWLNGKEYKCKVSNKALPAPIEKTISKAKGQ
PREPQVYTLPPSREEMTKNQVSLTCLVKGFYPSDIAVEWESNGQPENNYKTTPPVLDSDGSFFLYSKLT
VDKSRWQQGNVFSCSVMHEALHNHYTQKSLSLSPGK
SEQ ID NO: 726
14025_HC [hu anti-<huCDH19> 4A2 VH]::huIgG1z
QVQLQESGPGLVKPSQTLSLTCTVSGGSISSSGYYWSWIRQHPGKGLEWIGYIYYTGSAYYNPSLKSRV
TISVDTSKNQFSLKLSSVTAADTAVYYCARDGSSGWYFQYWGQGTLVTVSSASTKGPSVFPLAPSSKST
SGGTAALGCLVKDYFPEPVTVSWNSGALTSGVHTFPAVLQSSGLYSLSSVVTVPSSSLGTQTYICNVNH
KPSNTKVDKKVEPKSCDKTHTCPPCPAPELLGGPSVFLFPPKPKDTLMISRTPEVTCVVVDVSHEDPEVK
FNWYVDGVEVHNAKTKPREEQYNSTYRVVSVLTVLHQDWLNGKEYKCKVSNKALPAPIEKTISKAKG
QPREPQVYTLPPSREEMTKNQVSLTCLVKGFYPSDIAVEWESNGQPENNYKTTPPVLDSDGSFFLYSKL
TVDKSRWQQGNVFSCSVMHEALHNHYTQKSLSLSPGK
SEQ ID NO: 727
14026_HC [hu anti-<huCDH19> 4A2 (1-472)(Q17E,H47P) VH]::huIgG1z
QVQLQESGPGLVKPSETLSLTCTVSGGSISSSGYYWSWIRQPPGKGLEWIGYIYYTGSAYYNPSLKSRVT
ISVDTSKNQFSLKLSSVTAADTAVYYCARDGSSGWYFQYWGQGTLVTVSSASTKGPSVFPLAPSSKSTS
GGTAALGCLVKDYFPEPVTVSWNSGALTSGVHTFPAVLQSSGLYSLSSVVTVPSSSLGTQTYICNVNHK
PSNTKVDKKVEPKSCDKTHTCPPCPAPELLGGPSVFLFPPKPKDTLMISRTPEVTCVVVDVSHEDPEVKF
NWYVDGVEVHNAKTKPREEQYNSTYRVVSVLTVLHQDWLNGKEYKCKVSNKALPAPIEKTISKAKGQ
PREPQVYTLPPSREEMTKNQVSLTCLVKGFYPSDIAVEWESNGQPENNYKTTPPVLDSDGSFFLYSKLT
VDKSRWQQGNVFSCSVMHEALHNHYTQKSLSLSPGK
SEQ ID NO: 728
14027_HC [hu anti-<huCDH19> 4A2 (1-472)(Q17E,H47P,D111E) VH]::huIgG1z
QVQLQESGPGLVKPSETLSLTCTVSGGSISSSGYYWSWIRQPPGKGLEWIGYIYYTGSAYYNPSLKSRVT
ISVDTSKNQFSLKLSSVTAADTAVYYCAREGSSGWYFQYWGQGTLVTVSSASTKGPSVFPLAPSSKSTS
GGTAALGCLVKDYFPEPVTVSWNSGALTSGVHTFPAVLQSSGLYSLSSVVTVPSSSLGTQTYICNVNHK
PSNTKVDKKVEPKSCDKTHTCPPCPAPELLGGPSVFLFPPKPKDTLMISRTPEVTCVVVDVSHEDPEVKF
NWYVDGVEVHNAKTKPREEQYNSTYRVVSVLTVLHQDWLNGKEYKCKVSNKALPAPIEKTISKAKGQ
PREPQVYTLPPSREEMTKNQVSLTCLVKGFYPSDIAVEWESNGQPENNYKTTPPVLDSDGSFFLYSKLT
VDKSRWQQGNVFSCSVMHEALHNHYTQKSLSLSPGK
SEQ ID NO: 729
14028_HC [hu anti-<huCDH19> 4A2 (1-472)(Q17E,H47P,D111E,W134Y) VH]::huIgG1z
QVQLQESGPGLVKPSETLSLTCTVSGGSISSSGYYWSWIRQPPGKGLEWIGYIYYTGSAYYNPSLKSRVT
ISVDTSKNQFSLKLSSVTAADTAVYYCAREGSSGYYFQYWGQGTLVTVSSASTKGPSVFPLAPSSKSTS
GGTAALGCLVKDYFPEPVTVSWNSGALTSGVHTFPAVLQSSGLYSLSSVVTVPSSSLGTQTYICNVNHK
PSNTKVDKKVEPKSCDKTHTCPPCPAPELLGGPSVFLFPPKPKDTLMISRTPEVTCVVVDVSHEDPEVKF
NWYVDGVEVHNAKTKPREEQYNSTYRVVSVLTVLHQDWLNGKEYKCKVSNKALPAPIEKTISKAKGQ
PREPQVYTLPPSREEMTKNQVSLTCLVKGFYPSDIAVEWESNGQPENNYKTTPPVLDSDGSFFLYSKLT
VDKSRWQQGNVFSCSVMHEALHNHYTQKSLSLSPGK
SEQ ID NO: 730
14029_HC [hu anti-<huCDH19> 4A2 VH]::huIgG1z
QVQLQESGPGLVKPSQTLSLTCTVSGGSISSSGYYWSWIRQHPGKGLEWIGYIYYTGSAYYNPSLKSRV
TISVDTSKNQFSLKLSSVTAADTAVYYCARDGSSGWYFQYWGQGTLVTVSSASTKGPSVFPLAPSSKST
SGGTAALGCLVKDYFPEPVTVSWNSGALTSGVHTFPAVLQSSGLYSLSSVVTVPSSSLGTQTYICNVNH
KPSNTKVDKKVEPKSCDKTHTCPPCPAPELLGGPSVFLFPPKPKDTLMISRTPEVTCVVVDVSHEDPEVK
FNWYVDGVEVHNAKTKPREEQYNSTYRVVSVLTVLHQDWLNGKEYKCKVSNKALPAPIEKTISKAKG
QPREPQVYTLPPSREEMTKNQVSLTCLVKGFYPSDIAVEWESNGQPENNYKTTPPVLDSDGSFFLYSKL
TVDKSRWQQGNVFSCSVMHEALHNHYTQKSLSLSPGK
SEQ ID NO: 731
14030_HC [hu anti-<huCDH19> 4F3 (1-471)(R17G) VH]::huIgG1z
QVQLVESGGGVVQPGGSLRLSCAASGFSFSSYDMDWVRQTPGKGLEWVAVIWYDGSNKYYADSVRG
RFTISRDNSKNTLFLQMNSLRVEDTAVYYCARETGEGWYFDLWGRGTLVTVSSASTKGPSVFPLAPSSK
STSGGTAALGCLVKDYFPEPVTVSWNSGALTSGVHTFPAVLQSSGLYSLSSVVTVPSSSLGTQTYICNVN
HKPSNTKVDKKVEPKSCDKTHTCPPCPAPELLGGPSVFLFPPKPKDTLMISRTPEVTCVVVDVSHEDPEV
KFNWYVDGVEVHNAKTKPREEQYNSTYRVVSVLTVLHQDWLNGKEYKCKVSNKALPAPIEKTISKAK
GQPREPQVYTLPPSREEMTKNQVSLTCLVKGFYPSDIAVEWESNGQPENNYKTTPPVLDSDGSEFLYSK
LTVDKSRWQQGNVFSCSVMHEALHNHYTQKSLSLSPGK
SEQ ID NO: 732
14031_HC [hu anti-<huCDH19> 4F3 (1-471)(R17G,T47A) VH]::huIgG1z
QVQLVESGGGVVQPGGSLRLSCAASGFSFSSYDMDWVRQAPGKGLEWVAVIWYDGSNKYYADSVRG
RFTISRDNSKNTLFLQMNSLRVEDTAVYYCARETGEGWYFDLWGRGTLVTVSSASTKGPSVFPLAPSSK
STSGGTAALGCLVKDYFPEPVTVSWNSGALTSGVHTFPAVLQSSGLYSLSSVVTVPSSSLGTQTYICNVN
HKPSNTKVDKKVEPKSCDKTHTCPPCPAPELLGGPSVFLFPPKPKDTLMISRTPEVTCVVVDVSHEDPEV
KFNWYVDGVEVHNAKTKPREEQYNSTYRVVSVLTVLHQDWLNGKEYKCKVSNKALPAPIEKTISKAK
GQPREPQVYTLPPSREEMTKNQVSLTCLVKGFYPSDIAVEWESNGQPENNYKTTPPVLDSDGSEFLYSK
LTVDKSRWQQGNVFSCSVMHEALHNHYTQKSLSLSPGK
SEQ ID NO: 733
14032_HC [hu anti-<huCDH19> 4F3 (1-471)(R17G,T47A,R141Q) VH]::huIgG1z
QVQLVESGGGVVQPGGSLRLSCAASGFSFSSYDMDWVRQAPGKGLEWVAVIWYDGSNKYYADSVRG
RFTISRDNSKNTLFLQMNSLRVEDTAVYYCARETGEGWYFDLWGQGTLVTVSSASTKGPSVFPLAPSSK
STSGGTAALGCLVKDYFPEPVTVSWNSGALTSGVHTFPAVLQSSGLYSLSSVVTVPSSSLGTQTYICNVN
HKPSNTKVDKKVEPKSCDKTHTCPPCPAPELLGGPSVFLFPPKPKDTLMISRTPEVTCVVVDVSHEDPEV
KFNWYVDGVEVHNAKTKPREEQYNSTYRVVSVLTVLHQDWLNGKEYKCKVSNKALPAPIEKTISKAK
GQPREPQVYTLPPSREEMTKNQVSLTCLVKGFYPSDIAVEWESNGQPENNYKTTPPVLDSDGSEFLYSK
LTVDKSRWQQGNVFSCSVMHEALHNHYTQKSLSLSPGK
SEQ ID NO: 734
14033_HC [hu anti-<huCDH19> 4F3 (1-471)(R17G,T47A,D61E,D72E,R141Q) VH]::huIgG1z
QVQLVESGGGVVQPGGSLRLSCAASGFSFSSYDMDWVRQAPGKGLEWVAVIWYEGSNKYYAESVRG
RFTISRDNSKNTLFLQMNSLRVEDTAVYYCARETGEGWYFDLWGQGTLVTVSSASTKGPSVFPLAPSSK
STSGGTAALGCLVKDYFPEPVTVSWNSGALTSGVHTFPAVLQSSGLYSLSSVVTVPSSSLGTQTYICNVN
HKPSNTKVDKKVEPKSCDKTHTCPPCPAPELLGGPSVFLFPPKPKDTLMISRTPEVTCVVVDVSHEDPEV
KFNWYVDGVEVHNAKTKPREEQYNSTYRVVSVLTVLHQDWLNGKEYKCKVSNKALPAPIEKTISKAK
GQPREPQVYTLPPSREEMTKNQVSLTCLVKGFYPSDIAVEWESNGQPENNYKTTPPVLDSDGSEFLYSK
LTVDKSRWQQGNVFSCSVMHEALHNHYTQKSLSLSPGK
SEQ ID NO: 735
14034_HC [hu anti-<huCDH19> 4F3 (1-471)(R17G,T47A,D61E,D72E,W134Y,R141Q) VH]::huIgG1z
QVQLVESGGGVVQPGGSLRLSCAASGFSFSSYDMDWVRQAPGKGLEWVAVIWYEGSNKYYAESVRG
RFTISRDNSKNTLFLQMNSLRVEDTAVYYCARETGEGYYFDLWGQGTLVTVSSASTKGPSVFPLAPSSK
STSGGTAALGCLVKDYFPEPVTVSWNSGALTSGVHTFPAVLQSSGLYSLSSVVTVPSSSLGTQTYICNVN
HKPSNTKVDKKVEPKSCDKTHTCPPCPAPELLGGPSVFLFPPKPKDTLMISRTPEVTCVVVDVSHEDPEV
KFNWYVDGVEVHNAKTKPREEQYNSTYRVVSVLTVLHQDWLNGKEYKCKVSNKALPAPIEKTISKAK
GQPREPQVYTLPPSREEMTKNQVSLTCLVKGFYPSDIAVEWESNGQPENNYKTTPPVLDSDGSEFLYSK
LTVDKSRWQQGNVFSCSVMHEALHNHYTQKSLSLSPGK
SEQ ID NO: 736
14039_HC [hu anti-<huCDH19> 2G6 (1-477)(R17G,D61E,D72E,K94N) VH]::huIgG1z
QVQLVESGGGVVQPGGSLRLSCAASGFTFSSYGMHWVRQAPGKGLEWVAFIWYEGSNKYYAESVKD
RFTISRDNSKNTLYLQMNSLRAEDTAVYYCARRAGIIGTIGYYYGMDVWGQGTTVTVSSASTKGPSVFP
LAPSSKSTSGGTAALGCLVKDYFPEPVTVSWNSGALTSGVHTFPAVLQSSGLYSLSSVVTVPSSSLGTQT
YICNVNHKPSNTKVDKKVEPKSCDKTHTCPPCPAPELLGGPSVFLFPPKPKDTLMISRTPEVTCVVVDVS
HEDPEVKFNWYVDGVEVHNAKTKPREEQYNSTYRVVSVLTVLHQDWLNGKEYKCKVSNKALPAPIE
KTISKAKGQPREPQVYTLPPSREEMTKNQVSLTCLVKGFYPSDIAVEWESNGQPENNYKTTPPVLDSDG
SEFLYSKLTVDKSRWQQGNVFSCSVMHEALHNHYTQKSLSLSPGK
SEQ ID NO: 737
14040_HC [hu anti-<huCDH19> 16C1.1 VH]::huIgG1z
QVQLQESGPGLVKPSETLSLTCTVSGGSISGYYWSWIRQPPGKGLEWIGYIYYIGSTNYNPSLKSRVTMS
IDTSKNQFSLTLSSLTAADTAVYFCARDGSSGWYRWFDPWGQGTLVTVSSASTKGPSVFPLAPSSKSTS
GGTAALGCLVKDYFPEPVTVSWNSGALTSGVHTFPAVLQSSGLYSLSSVVTVPSSSLGTQTYICNVNHK
PSNTKVDKKVEPKSCDKTHTCPPCPAPELLGGPSVFLFPPKPKDTLMISRTPEVTCVVVDVSHEDPEVKF
NWYVDGVEVHNAKTKPREEQYNSTYRVVSVLTVLHQDWLNGKEYKCKVSNKALPAPIEKTISKAKGQ
PREPQVYTLPPSREEMTKNQVSLTCLVKGFYPSDIAVEWESNGQPENNYKTTPPVLDSDGS1-tLYSKLT
VDKSRWQQGNVFSCSVMHEALHNHYTQKSLSLSPGK
SEQ ID NO: 738
14041_HC [hu anti-<huCDH19> 16C1.1 (1-469)(T92K) VH]::huIgG1z
QVQLQESGPGLVKPSETLSLTCTVSGGSISGYYWSWIRQPPGKGLEWIGYIYYIGSTNYNPSLKSRVTMS
IDTSKNQFSLKLSSLTAADTAVYFCARDGSSGWYRWFDPWGQGTLVTVSSASTKGPSVFPLAPSSKSTS
GGTAALGCLVKDYFPEPVTVSWNSGALTSGVHTFPAVLQSSGLYSLSSVVTVPSSSLGTQTYICNVNHK
PSNTKVDKKVEPKSCDKTHTCPPCPAPELLGGPSVFLFPPKPKDTLMISRTPEVTCVVVDVSHEDPEVKF
NWYVDGVEVHNAKTKPREEQYNSTYRVVSVLTVLHQDWLNGKEYKCKVSNKALPAPIEKTISKAKGQ
PREPQVYTLPPSREEMTKNQVSLTCLVKGFYPSDIAVEWESNGQPENNYKTTPPVLDSDGS1-tLYSKLT
VDKSRWQQGNVFSCSVMHEALHNHYTQKSLSLSPGK
SEQ ID NO: 739
14042_HC [hu anti-<huCDH19> 16C1.1 (1-469)(T92K,D109E) VH]::huIgG1z
QVQLQESGPGLVKPSETLSLTCTVSGGSISGYYWSWIRQPPGKGLEWIGYIYYIGSTNYNPSLKSRVTMS
IDTSKNQFSLKLSSLTAADTAVYFCAREGSSGWYRWFDPWGQGTLVTVSSASTKGPSVFPLAPSSKSTS
GGTAALGCLVKDYFPEPVTVSWNSGALTSGVHTFPAVLQSSGLYSLSSVVTVPSSSLGTQTYICNVNHK
PSNTKVDKKVEPKSCDKTHTCPPCPAPELLGGPSVFLFPPKPKDTLMISRTPEVTCVVVDVSHEDPEVKF
NWYVDGVEVHNAKTKPREEQYNSTYRVVSVLTVLHQDWLNGKEYKCKVSNKALPAPIEKTISKAKGQ
PREPQVYTLPPSREEMTKNQVSLTCLVKGFYPSDIAVEWESNGQPENNYKTTPPVLDSDGS1-tLYSKLT
VDKSRWQQGNVFSCSVMHEALHNHYTQKSLSLSPGK
SEQ ID NO: 740
14043_HC [hu anti-<huCDH19> 16C1.1 (1-469)(T92K,W132Y,W135Y) VH]::huIgG1z
QVQLQESGPGLVKPSETLSLTCTVSGGSISGYYWSWIRQPPGKGLEWIGYIYYIGSTNYNPSLKSRVTMS
IDTSKNQFSLKLSSLTAADTAVYFCARDGSSGYYRYFDPWGQGTLVTVSSASTKGPSVFPLAPSSKSTSG
GTAALGCLVKDYFPEPVTVSWNSGALTSGVHTFPAVLQSSGLYSLSSVVTVPSSSLGTQTYICNVNHKP
SNTKVDKKVEPKSCDKTHTCPPCPAPELLGGPSVFLFPPKPKDTLMISRTPEVTCVVVDVSHEDPEVKFN
WYVDGVEVHNAKTKPREEQYNSTYRVVSVLTVLHQDWLNGKEYKCKVSNKALPAPIEKTISKAKGQP
REPQVYTLPPSREEMTKNQVSLTCLVKGFYPSDIAVEWESNGQPENNYKTTPPVLDSDGS1-tLYSKLTV
DKSRWQQGNVFSCSVMHEALHNHYTQKSLSLSPGK
SEQ ID NO: 741
14044_HC [hu anti-<huCDH19> 16C1.1 (1-469)(T92K) VH]::huIgG1z
QVQLQESGPGLVKPSETLSLTCTVSGGSISGYYWSWIRQPPGKGLEWIGYIYYIGSTNYNPSLKSRVTMS
IDTSKNQFSLKLSSLTAADTAVYFCARDGSSGWYRWFDPWGQGTLVTVSSASTKGPSVFPLAPSSKSTS
GGTAALGCLVKDYFPEPVTVSWNSGALTSGVHTFPAVLQSSGLYSLSSVVTVPSSSLGTQTYICNVNHK
PSNTKVDKKVEPKSCDKTHTCPPCPAPELLGGPSVFLFPPKPKDTLMISRTPEVTCVVVDVSHEDPEVKF
NWYVDGVEVHNAKTKPREEQYNSTYRVVSVLTVLHQDWLNGKEYKCKVSNKALPAPIEKTISKAKGQ
PREPQVYTLPPSREEMTKNQVSLTCLVKGFYPSDIAVEWESNGQPENNYKTTPPVLDSDGS1-tLYSKLT
VDKSRWQQGNVFSCSVMHEALHNHYTQKSLSLSPGK
SEQ ID NO: 742
14045_HC [hu anti-<huCDH19> 17H8.2 VH]::huIgG1z
QVQLQESGPGLVKPSETLSLTCTVSGGSINSYYWSWIRQPPGKGLEWIGYIYYIGSTNYNPSLKSRVTISV
DTSKNQFSLKLSSVTAADTALYYCARDSRYRSGWYDAFDIWGQGTMVTVSSASTKGPSVFPLAPSSKS
TSGGTAALGCLVKDYFPEPVTVSWNSGALTSGVHTFPAVLQSSGLYSLSSVVTVPSSSLGTQTYICNVN
HKPSNTKVDKKVEPKSCDKTHTCPPCPAPELLGGPSVFLFPPKPKDTLMISRTPEVTCVVVDVSHEDPEV
KFNWYVDGVEVHNAKTKPREEQYNSTYRVVSVLTVLHQDWLNGKEYKCKVSNKALPAPIEKTISKAK
GQPREPQVYTLPPSREEMTKNQVSLTCLVKGFYPSDIAVEWESNGQPENNYKTTPPVLDSDGSEFLYSK
LTVDKSRWQQGNVFSCSVMHEALHNHYTQKSLSLSPGK
SEQ ID NO: 743
14046_HC [hu anti-<huCDH19> 17H8.2 (1-471)(D109E) VH]::huIgG1z
QVQLQESGPGLVKPSETLSLTCTVSGGSINSYYWSWIRQPPGKGLEWIGYIYYIGSTNYNPSLKSRVTISV
DTSKNQFSLKLSSVTAADTALYYCARESRYRSGWYDAFDIWGQGTMVTVSSASTKGPSVFPLAPSSKST
SGGTAALGCLVKDYFPEPVTVSWNSGALTSGVHTFPAVLQSSGLYSLSSVVTVPSSSLGTQTYICNVNH
KPSNTKVDKKVEPKSCDKTHTCPPCPAPELLGGPSVFLFPPKPKDTLMISRTPEVTCVVVDVSHEDPEVK
FNWYVDGVEVHNAKTKPREEQYNSTYRVVSVLTVLHQDWLNGKEYKCKVSNKALPAPIEKTISKAKG
QPREPQVYTLPPSREEMTKNQVSLTCLVKGFYPSDIAVEWESNGQPENNYKTTPPVLDSDGSEFLYSKL
TVDKSRWQQGNVFSCSVMHEALHNHYTQKSLSLSPGK
SEQ ID NO: 744
14047_HC [hu anti-<huCDH19> 17118.2 (1-471)(D109E,W132Y) VH]::huIgG1z
QVQLQESGPGLVKPSETLSLTCTVSGGSINSYYWSWIRQPPGKGLEWIGYIYYIGSTNYNPSLKSRVTISV
DTSKNQFSLKLSSVTAADTALYYCARESRYRSGYYDAFDIWGQGTMVTVSSASTKGPSVFPLAPSSKST
SGGTAALGCLVKDYFPEPVTVSWNSGALTSGVHTFPAVLQSSGLYSLSSVVTVPSSSLGTQTYICNVNH
KPSNTKVDKKVEPKSCDKTHTCPPCPAPELLGGPSVFLFPPKPKDTLMISRTPEVTCVVVDVSHEDPEVK
FNWYVDGVEVHNAKTKPREEQYNSTYRVVSVLTVLHQDWLNGKEYKCKVSNKALPAPIEKTISKAKG
QPREPQVYTLPPSREEMTKNQVSLTCLVKGFYPSDIAVEWESNGQPENNYKTTPPVLDSDGSEFLYSKL
TVDKSRWQQGNVFSCSVMHEALHNHYTQKSLSLSPGK
SEQ ID NO: 745
14048_HC [hu anti-<huCDH19> 17118.2 (1-471)(D109E) VH]::huIgG1z
QVQLQESGPGLVKPSETLSLTCTVSGGSINSYYWSWIRQPPGKGLEWIGYIYYIGSTNYNPSLKSRVTISV
DTSKNQFSLKLSSVTAADTALYYCARESRYRSGWYDAFDIWGQGTMVTVSSASTKGPSVFPLAPSSKST
SGGTAALGCLVKDYFPEPVTVSWNSGALTSGVHTFPAVLQSSGLYSLSSVVTVPSSSLGTQTYICNVNH
KPSNTKVDKKVEPKSCDKTHTCPPCPAPELLGGPSVFLFPPKPKDTLMISRTPEVTCVVVDVSHEDPEVK
FNWYVDGVEVHNAKTKPREEQYNSTYRVVSVLTVLHQDWLNGKEYKCKVSNKALPAPIEKTISKAKG
QPREPQVYTLPPSREEMTKNQVSLTCLVKGFYPSDIAVEWESNGQPENNYKTTPPVLDSDGSEFLYSKL
TVDKSRWQQGNVFSCSVMHEALHNHYTQKSLSLSPGK
SEQ ID NO: 746
14049_HC [hu anti-<huCDH19> 4F7 VH]::huIgG1z
QVQLQESGPGLVKPSETLSLTCTVSGGSISSYSWSWIRQPPGKGLEWIGYIYYSGSTNYNPSLKSRVTISL
DTSKNQFSLKLSSVTAADTAVYYCARNWAFHFDYWGQGTLVTVSSASTKGPSVFPLAPSSKSTSGGTA
ALGCLVKDYFPEPVTVSWNSGALTSGVHTFPAVLQSSGLYSLSSVVTVPSSSLGTQTYICNVNHKPSNT
KVDKKVEPKSCDKTHTCPPCPAPELLGGPSVFLFPPKPKDTLMISRTPEVTCVVVDVSHEDPEVKFNWY
VDGVEVHNAKTKPREEQYNSTYRVVSVLTVLHQDWLNGKEYKCKVSNKALPAPIEKTISKAKGQPREP
QVYTLPPSREEMTKNQVSLTCLVKGFYPSDIAVEWESNGQPENNYKTTPPVLDSDGSEFLYSKLTVDKS
RWQQGNVFSCSVMHEALHNHYTQKSLSLSPGK
SEQ ID NO: 747
14050_HC [hu anti-<huCDH19> 4F7 VH]::huIgG1z
QVQLQESGPGLVKPSETLSLTCTVSGGSISSYSWSWIRQPPGKGLEWIGYIYYSGSTNYNPSLKSRVTISL
DTSKNQFSLKLSSVTAADTAVYYCARNWAFHFDYWGQGTLVTVSSASTKGPSVFPLAPSSKSTSGGTA
ALGCLVKDYFPEPVTVSWNSGALTSGVHTFPAVLQSSGLYSLSSVVTVPSSSLGTQTYICNVNHKPSNT
KVDKKVEPKSCDKTHTCPPCPAPELLGGPSVFLFPPKPKDTLMISRTPEVTCVVVDVSHEDPEVKFNWY
VDGVEVHNAKTKPREEQYNSTYRVVSVLTVLHQDWLNGKEYKCKVSNKALPAPIEKTISKAKGQPREP
QVYTLPPSREEMTKNQVSLTCLVKGFYPSDIAVEWESNGQPENNYKTTPPVLDSDGSEFLYSKLTVDKS
RWQQGNVFSCSVMHEALHNHYTQKSLSLSPGK
SEQ ID NO: 748
14051_HC [hu anti-<huCDH19> 4F7 (1-468)(W113Y) VH]::huIgG1z
QVQLQESGPGLVKPSETLSLTCTVSGGSISSYSWSWIRQPPGKGLEWIGYIYYSGSTNYNPSLKSRVTISL
DTSKNQFSLKLSSVTAADTAVYYCARNYAFHFDYWGQGTLVTVSSASTKGPSVFPLAPSSKSTSGGTA
ALGCLVKDYFPEPVTVSWNSGALTSGVHTFPAVLQSSGLYSLSSVVTVPSSSLGTQTYICNVNHKPSNT
KVDKKVEPKSCDKTHTCPPCPAPELLGGPSVFLFPPKPKDTLMISRTPEVTCVVVDVSHEDPEVKFNWY
VDGVEVHNAKTKPREEQYNSTYRVVSVLTVLHQDWLNGKEYKCKVSNKALPAPIEKTISKAKGQPREP
QVYTLPPSREEMTKNQVSLTCLVKGFYPSDIAVEWESNGQPENNYKTTPPVLDSDGSEFLYSKLTVDKS
RWQQGNVFSCSVMHEALHNHYTQKSLSLSPGK
SEQ ID NO: 749
14052_HC [hu anti-<huCDH19> 4B10 (1-471)(R17G,D61E,D72E,W134Y) VH]::huIgG1z
QVQLVESGGGVVQPGGSLRLSCAASGFTFSSYDMHWVRQAPGKGLEWVAVISYEGTNEYYAESVKGR
FTISRDTSKNTLYLQMNSLRAEDTAVYYCARERYFDYSFDYWGQGTLVSVSSASTKGPSVFPLAPSSKS
TSGGTAALGCLVKDYFPEPVTVSWNSGALTSGVHTFPAVLQSSGLYSLSSVVTVPSSSLGTQTYICNVN
HKPSNTKVDKKVEPKSCDKTHTCPPCPAPELLGGPSVFLFPPKPKDTLMISRTPEVTCVVVDVSHEDPEV
KFNWYVDGVEVHNAKTKPREEQYNSTYRVVSVLTVLHQDWLNGKEYKCKVSNKALPAPIEKTISKAK
GQPREPQVYTLPPSREEMTKNQVSLTCLVKGFYPSDIAVEWESNGQPENNYKTTPPVLDSDGSFFLYSK
LTVDKSRWQQGNVFSCSVMHEALHNHYTQKSLSLSPGK
SEQ ID NO: 750
14053_HC [hu anti-<huCDH19> 4B10 VH]::huIgG1z
QVQLVESGGGVVQPGRSLRLSCAASGFTFSSYDMHWVRQAPGKGLEWVAVISYDGTNEYYADSVKGR
FTISRDTSKNTLYLQMNSLRAEDTAVYYCARERYFDWSFDYWGQGTLVSVSSASTKGPSVFPLAPSSKS
TSGGTAALGCLVKDYFPEPVTVSWNSGALTSGVHTFPAVLQSSGLYSLSSVVTVPSSSLGTQTYICNVN
HKPSNTKVDKKVEPKSCDKTHTCPPCPAPELLGGPSVFLFPPKPKDTLMISRTPEVTCVVVDVSHEDPEV
KFNWYVDGVEVHNAKTKPREEQYNSTYRVVSVLTVLHQDWLNGKEYKCKVSNKALPAPIEKTISKAK
GQPREPQVYTLPPSREEMTKNQVSLTCLVKGFYPSDIAVEWESNGQPENNYKTTPPVLDSDGSFFLYSK
LTVDKSRWQQGNVFSCSVMHEALHNHYTQKSLSLSPGK
SEQ ID NO: 751
14054_HC [hu anti-<huCDH19> 4B10 (1-471)(R17G) VH]::huIgG1z
QVQLVESGGGVVQPGGSLRLSCAASGFTFSSYDMHWVRQAPGKGLEWVAVISYDGTNEYYADSVKG
RFTISRDTSKNTLYLQMNSLRAEDTAVYYCARERYFDWSFDYWGQGTLVSVSSASTKGPSVFPLAPSSK
STSGGTAALGCLVKDYFPEPVTVSWNSGALTSGVHTFPAVLQSSGLYSLSSVVTVPSSSLGTQTYICNVN
HKPSNTKVDKKVEPKSCDKTHTCPPCPAPELLGGPSVFLFPPKPKDTLMISRTPEVTCVVVDVSHEDPEV
KFNWYVDGVEVHNAKTKPREEQYNSTYRVVSVLTVLHQDWLNGKEYKCKVSNKALPAPIEKTISKAK
GQPREPQVYTLPPSREEMTKNQVSLTCLVKGFYPSDIAVEWESNGQPENNYKTTPPVLDSDGSFFLYSK
LTVDKSRWQQGNVFSCSVMHEALHNHYTQKSLSLSPGK
SEQ ID NO: 752
14055_HC [hu anti-<huCDH19> 4B10 (1-471)(R17G,D61E,D72E) VH]::huIgG1z
QVQLVESGGGVVQPGGSLRLSCAASGFTFSSYDMHWVRQAPGKGLEWVAVISYEGTNEYYAESVKGR
FTISRDTSKNTLYLQMNSLRAEDTAVYYCARERYFDWSFDYWGQGTLVSVSSASTKGPSVFPLAPSSKS
TSGGTAALGCLVKDYFPEPVTVSWNSGALTSGVHTFPAVLQSSGLYSLSSVVTVPSSSLGTQTYICNVN
HKPSNTKVDKKVEPKSCDKTHTCPPCPAPELLGGPSVFLFPPKPKDTLMISRTPEVTCVVVDVSHEDPEV
KFNWYVDGVEVHNAKTKPREEQYNSTYRVVSVLTVLHQDWLNGKEYKCKVSNKALPAPIEKTISKAK
GQPREPQVYTLPPSREEMTKNQVSLTCLVKGFYPSDIAVEWESNGQPENNYKTTPPVLDSDGSFFLYSK
LTVDKSRWQQGNVFSCSVMHEALHNHYTQKSLSLSPGK
SEQ ID NO: 753
14056_HC [hu anti-<huCDH19> 4A9 VH]::huIgG1z
QVQLQESGPGLVKPSETLSLTCTVSGGSISGYYWSWIRQPPGKGLEWFAYFSYSGSTNYNPSLKSRVTLS
VDTSKNQFSLKLSSVTAADTAVYYCARNWAFHFDFWGQGTLVTVSSASTKGPSVFPLAPSSKSTSGGT
AALGCLVKDYFPEPVTVSWNSGALTSGVHTFPAVLQSSGLYSLSSVVTVPSSSLGTQTYICNVNHKPSN
TKVDKKVEPKSCDKTHTCPPCPAPELLGGPSVFLFPPKPKDTLMISRTPEVTCVVVDVSHEDPEVKFNW
YVDGVEVHNAKTKPREEQYNSTYRVVSVLTVLHQDWLNGKEYKCKVSNKALPAPIEKTISKAKGQPR
EPQVYTLPPSREEMTKNQVSLTCLVKGFYPSDIAVEWESNGQPENNYKTTPPVLDSDGSFFLYSKLTVD
KSRWQQGNVFSCSVMHEALHNHYTQKSLSLSPGK
SEQ ID NO: 754
14057_HC [hu anti-<huCDH19> 4A9 (1-468)(F55I,A56G) VH]::huIgG1z
QVQLQESGPGLVKPSETLSLTCTVSGGSISGYYWSWIRQPPGKGLEWIGYFSYSGSTNYNPSLKSRVTLS
VDTSKNQFSLKLSSVTAADTAVYYCARNWAFHFDFWGQGTLVTVSSASTKGPSVFPLAPSSKSTSGGT
AALGCLVKDYFPEPVTVSWNSGALTSGVHTFPAVLQSSGLYSLSSVVTVPSSSLGTQTYICNVNHKPSN
TKVDKKVEPKSCDKTHTCPPCPAPELLGGPSVFLFPPKPKDTLMISRTPEVTCVVVDVSHEDPEVKFNW
YVDGVEVHNAKTKPREEQYNSTYRVVSVLTVLHQDWLNGKEYKCKVSNKALPAPIEKTISKAKGQPR
EPQVYTLPPSREEMTKNQVSLTCLVKGFYPSDIAVEWESNGQPENNYKTTPPVLDSDGSFFLYSKLTVD
KSRWQQGNVFSCSVMHEALHNHYTQKSLSLSPGK
SEQ ID NO: 755
14058_HC [hu anti-<huCDH19> 4A9 (1-468)(F55I,A56G) VH]::huIgG1z
QVQLQESGPGLVKPSETLSLTCTVSGGSISGYYWSWIRQPPGKGLEWIGYFSYSGSTNYNPSLKSRVTLS
VDTSKNQFSLKLSSVTAADTAVYYCARNWAFHFDFWGQGTLVTVSSASTKGPSVFPLAPSSKSTSGGT
AALGCLVKDYFPEPVTVSWNSGALTSGVHTFPAVLQSSGLYSLSSVVTVPSSSLGTQTYICNVNHKPSN
TKVDKKVEPKSCDKTHTCPPCPAPELLGGPSVFLFPPKPKDTLMISRTPEVTCVVVDVSHEDPEVKFNW
YVDGVEVHNAKTKPREEQYNSTYRVVSVLTVLHQDWLNGKEYKCKVSNKALPAPIEKTISKAKGQPR
EPQVYTLPPSREEMTKNQVSLTCLVKGFYPSDIAVEWESNGQPENNYKTTPPVLDSDGSFFLYSKLTVD
KSRWQQGNVFSCSVMHEALHNHYTQKSLSLSPGK
SEQ ID NO: 756
14059_HC [hu anti-<huCDH19> 4A9 (1-468)(F55I,A56G,W113Y) VH]::huIgG1z
QVQLQESGPGLVKPSETLSLTCTVSGGSISGYYWSWIRQPPGKGLEWIGYFSYSGSTNYNPSLKSRVTLS
VDTSKNQFSLKLSSVTAADTAVYYCARNYAFHFDFWGQGTLVTVSSASTKGPSVFPLAPSSKSTSGGTA
ALGCLVKDYFPEPVTVSWNSGALTSGVHTFPAVLQSSGLYSLSSVVTVPSSSLGTQTYICNVNHKPSNT
KVDKKVEPKSCDKTHTCPPCPAPELLGGPSVFLFPPKPKDTLMISRTPEVTCVVVDVSHEDPEVKFNWY
VDGVEVHNAKTKPREEQYNSTYRVVSVLTVLHQDWLNGKEYKCKVSNKALPAPIEKTISKAKGQPREP
QVYTLPPSREEMTKNQVSLTCLVKGFYPSDIAVEWESNGQPENNYKTTPPVLDSDGSFFLYSKLTVDKS
RWQQGNVFSCSVMHEALHNHYTQKSLSLSPGK
SEQ ID NO: 757
14060_HC [hu anti-<huCDH19> 20D3.1 VH]::huIgG1z
QVQLVQSGAEVKKPGASVKVSCKVSGYTFTSYFIHWVRQAPGQGLEWMGIINPISVSTSYAQKFQGRV
TMTRDTSTSTVFMELSSLRSEDTAVYYCARGGIQLWLHFDYWGQGTLVTVSSASTKGPSVFPLAPSSKS
TSGGTAALGCLVKDYFPEPVTVSWNSGALTSGVHTFPAVLQSSGLYSLSSVVTVPSSSLGTQTYICNVN
HKPSNTKVDKKVEPKSCDKTHTCPPCPAPELLGGPSVFLFPPKPKDTLMISRTPEVTCVVVDVSHEDPEV
KFNWYVDGVEVHNAKTKPREEQYNSTYRVVSVLTVLHQDWLNGKEYKCKVSNKALPAPIEKTISKAK
GQPREPQVYTLPPSREEMTKNQVSLTCLVKGFYPSDIAVEWESNGQPENNYKTTPPVLDSDGSFFLYSK
LTVDKSRWQQGNVFSCSVMHEALHNHYTQKSLSLSPGK
SEQ ID NO: 758
14061_HC [hu anti-<huCDH19> 20D3.1 VH]::huIgG1z
QVQLVQSGAEVKKPGASVKVSCKVSGYTFTSYFIHWVRQAPGQGLEWMGIINPISVSTSYAQKFQGRV
TMTRDTSTSTVFMELSSLRSEDTAVYYCARGGIQLWLHFDYWGQGTLVTVSSASTKGPSVFPLAPSSKS
TSGGTAALGCLVKDYFPEPVTVSWNSGALTSGVHTFPAVLQSSGLYSLSSVVTVPSSSLGTQTYICNVN
HKPSNTKVDKKVEPKSCDKTHTCPPCPAPELLGGPSVFLFPPKPKDTLMISRTPEVTCVVVDVSHEDPEV
KFNWYVDGVEVHNAKTKPREEQYNSTYRVVSVLTVLHQDWLNGKEYKCKVSNKALPAPIEKTISKAK
GQPREPQVYTLPPSREEMTKNQVSLTCLVKGFYPSDIAVEWESNGQPENNYKTTPPVLDSDGSFFLYSK
LTVDKSRWQQGNVFSCSVMHEALHNHYTQKSLSLSPGK
SEQ ID NO: 759
14062_HC [hu anti-<huCDH19> 20D3.1 (1-469)(W133Y) VH]::huIgG1z
QVQLVQSGAEVKKPGASVKVSCKVSGYTFTSYFIHWVRQAPGQGLEWMGIINPISVSTSYAQKFQGRV
TMTRDTSTSTVFMELSSLRSEDTAVYYCARGGIQLYLHFDYWGQGTLVTVSSASTKGPSVFPLAPSSKS
TSGGTAALGCLVKDYFPEPVTVSWNSGALTSGVHTFPAVLQSSGLYSLSSVVTVPSSSLGTQTYICNVN
HKPSNTKVDKKVEPKSCDKTHTCPPCPAPELLGGPSVFLFPPKPKDTLMISRTPEVTCVVVDVSHEDPEV
KFNWYVDGVEVHNAKTKPREEQYNSTYRVVSVLTVLHQDWLNGKEYKCKVSNKALPAPIEKTISKAK
GQPREPQVYTLPPSREEMTKNQVSLTCLVKGFYPSDIAVEWESNGQPENNYKTTPPVLDSDGSFFLYSK
LTVDKSRWQQGNVFSCSVMHEALHNHYTQKSLSLSPGK
SEQ ID NO: 760
14063_HC [hu anti-<huCDH19> 20D3.1 (1-469)(W133Y) VH]::huIgG1z
QVQLVQSGAEVKKPGASVKVSCKVSGYTFTSYFIHWVRQAPGQGLEWMGIINPISVSTSYAQKFQGRV
TMTRDTSTSTVFMELSSLRSEDTAVYYCARGGIQLYLHFDYWGQGTLVTVSSASTKGPSVFPLAPSSKS
TSGGTAALGCLVKDYFPEPVTVSWNSGALTSGVHTFPAVLQSSGLYSLSSVVTVPSSSLGTQTYICNVN
HKPSNTKVDKKVEPKSCDKTHTCPPCPAPELLGGPSVFLFPPKPKDTLMISRTPEVTCVVVDVSHEDPEV
KFNWYVDGVEVHNAKTKPREEQYNSTYRVVSVLTVLHQDWLNGKEYKCKVSNKALPAPIEKTISKAK
GQPREPQVYTLPPSREEMTKNQVSLTCLVKGFYPSDIAVEWESNGQPENNYKTTPPVLDSDGSFFLYSK
LTVDKSRWQQGNVFSCSVMHEALHNHYTQKSLSLSPGK
SEQ ID NO: 761
14064_HC [hu anti-<huCDH19> 20D3.1 (1-469)(W133Y) VH]::huIgG1z
QVQLVQSGAEVKKPGASVKVSCKVSGYTFTSYFIHWVRQAPGQGLEWMGIINPISVSTSYAQKFQGRV
TMTRDTSTSTVFMELSSLRSEDTAVYYCARGGIQLYLHFDYWGQGTLVTVSSASTKGPSVFPLAPSSKS
TSGGTAALGCLVKDYFPEPVTVSWNSGALTSGVHTFPAVLQSSGLYSLSSVVTVPSSSLGTQTYICNVN
HKPSNTKVDKKVEPKSCDKTHTCPPCPAPELLGGPSVFLFPPKPKDTLMISRTPEVTCVVVDVSHEDPEV
KFNWYVDGVEVHNAKTKPREEQYNSTYRVVSVLTVLHQDWLNGKEYKCKVSNKALPAPIEKTISKAK
GQPREPQVYTLPPSREEMTKNQVSLTCLVKGFYPSDIAVEWESNGQPENNYKTTPPVLDSDGSFFLYSK
LTVDKSRWQQGNVFSCSVMHEALHNHYTQKSLSLSPGK
SEQ ID NO: 762
14065_HC [hu anti-<huCDH19> 22G10.1 (1-470)(S82R,A99E) VH]::huIgG1z
EVQLLESGGGLVQPGGSLRLSCAASGFTFSSYAMNWVRQAPGKGLEWVSTISGGGANTYYADSVKGR
FTISRDNSKSTLYLQMNSLRAEDTAVYHCAKGGMGGYYYGMDVWGQGTTVTVSSASTKGPSVFPLAP
SSKSTSGGTAALGCLVKDYFPEPVTVSWNSGALTSGVHTFPAVLQSSGLYSLSSVVTVPSSSLGTQTYIC
NVNHKPSNTKVDKKVEPKSCDKTHTCPPCPAPELLGGPSVFLFPPKPKDTLMISRTPEVTCVVVDVSHE
DPEVKFNWYVDGVEVHNAKTKPREEQYNSTYRVVSVLTVLHQDWLNGKEYKCKVSNKALPAPIEKTI
SKAKGQPREPQVYTLPPSREEMTKNQVSLTCLVKGFYPSDIAVEWESNGQPENNYKTTPPVLDSDGSFF
LYSKLTVDKSRWQQGNVFSCSVMHEALHNHYTQKSLSLSPGK
SEQ ID NO: 763
14066_HC [hu anti-<huCDH19> 22G10.1 (1-470)(A99E,H105Y) VH]::huIgG1z
EVQLLESGGGLVQPGGSLRLSCAASGFTFSSYAMNWVRQAPGKGLEWVSTISGGGANTYYADSVKGR
FTISSDNSKSTLYLQMNSLRAEDTAVYYCAKGGMGGYYYGMDVWGQGTTVTVSSASTKGPSVFPLAP
SSKSTSGGTAALGCLVKDYFPEPVTVSWNSGALTSGVHTFPAVLQSSGLYSLSSVVTVPSSSLGTQTYIC
NVNHKPSNTKVDKKVEPKSCDKTHTCPPCPAPELLGGPSVFLFPPKPKDTLMISRTPEVTCVVVDVSHE
DPEVKFNWYVDGVEVHNAKTKPREEQYNSTYRVVSVLTVLHQDWLNGKEYKCKVSNKALPAPIEKTI
SKAKGQPREPQVYTLPPSREEMTKNQVSLTCLVKGFYPSDIAVEWESNGQPENNYKTTPPVLDSDGSFF
LYSKLTVDKSRWQQGNVFSCSVMHEALHNHYTQKSLSLSPGK
SEQ ID NO: 764
14067_HC [hu anti-<huCDH19> 22G10.1 (1-470)(A99E) VH]::huIgG1z
EVQLLESGGGLVQPGGSLRLSCAASGFTFSSYAMNWVRQAPGKGLEWVSTISGGGANTYYADSVKGR
FTISSDNSKSTLYLQMNSLRAEDTAVYHCAKGGMGGYYYGMDVWGQGTTVTVSSASTKGPSVFPLAP
SSKSTSGGTAALGCLVKDYFPEPVTVSWNSGALTSGVHTFPAVLQSSGLYSLSSVVTVPSSSLGTQTYIC
NVNHKPSNTKVDKKVEPKSCDKTHTCPPCPAPELLGGPSVFLFPPKPKDTLMISRTPEVTCVVVDVSHE
DPEVKFNWYVDGVEVHNAKTKPREEQYNSTYRVVSVLTVLHQDWLNGKEYKCKVSNKALPAPIEKTI
SKAKGQPREPQVYTLPPSREEMTKNQVSLTCLVKGFYPSDIAVEWESNGQPENNYKTTPPVLDSDGSFF
LYSKLTVDKSRWQQGNVFSCSVMHEALHNHYTQKSLSLSPGK
SEQ ID NO: 765
14068_HC [hu anti-<huCDH19> 22G10.1 (1-470)(A99E) VH]::huIgG1z
EVQLLESGGGLVQPGGSLRLSCAASGFTFSSYAMNWVRQAPGKGLEWVSTISGGGANTYYADSVKGR
FTISSDNSKSTLYLQMNSLRAEDTAVYHCAKGGMGGYYYGMDVWGQGTTVTVSSASTKGPSVFPLAP
SSKSTSGGTAALGCLVKDYFPEPVTVSWNSGALTSGVHTFPAVLQSSGLYSLSSVVTVPSSSLGTQTYIC
NVNHKPSNTKVDKKVEPKSCDKTHTCPPCPAPELLGGPSVFLFPPKPKDTLMISRTPEVTCVVVDVSHE
DPEVKFNWYVDGVEVHNAKTKPREEQYNSTYRVVSVLTVLHQDWLNGKEYKCKVSNKALPAPIEKTI
SKAKGQPREPQVYTLPPSREEMTKNQVSLTCLVKGFYPSDIAVEWESNGQPENNYKTTPPVLDSDGSFF
LYSKLTVDKSRWQQGNVFSCSVMHEALHNHYTQKSLSLSPGK
SEQ ID NO: 766
14069_HC [hu anti-<huCDH19> 22G10.1 (1-470)(D72E,A99E) VH]::huIgG1z
EVQLLESGGGLVQPGGSLRLSCAASGFTFSSYAMNWVRQAPGKGLEWVSTISGGGANTYYAESVKGRF
TISSDNSKSTLYLQMNSLRAEDTAVYHCAKGGMGGYYYGMDVWGQGTTVTVSSASTKGPSVFPLAPS
SKSTSGGTAALGCLVKDYFPEPVTVSWNSGALTSGVHTFPAVLQSSGLYSLSSVVTVPSSSLGTQTYICN
VNHKPSNTKVDKKVEPKSCDKTHTCPPCPAPELLGGPSVFLFPPKPKDTLMISRTPEVTCVVVDVSHEDP
EVKFNWYVDGVEVHNAKTKPREEQYNSTYRVVSVLTVLHQDWLNGKEYKCKVSNKALPAPIEKTISK
AKGQPREPQVYTLPPSREEMTKNQVSLTCLVKGFYPSDIAVEWESNGQPENNYKTTPPVLDSDGSFFLY
SKLTVDKSRWQQGNVFSCSVMHEALHNHYTQKSLSLSPGK
SEQ ID NO: 767
14070_HC [hu anti-<huCDH19> 22G10.1 (1-470)(H105Y) VH]::huIgG1z
EVQLLESGGGLVQPGGSLRLSCAASGFTFSSYAMNWVRQAPGKGLEWVSTISGGGANTYYADSVKGR
FTISSDNSKSTLYLQMNSLRAADTAVYYCAKGGMGGYYYGMDVWGQGTTVTVSSASTKGPSVFPLAP
SSKSTSGGTAALGCLVKDYFPEPVTVSWNSGALTSGVHTFPAVLQSSGLYSLSSVVTVPSSSLGTQTYIC
NVNHKPSNTKVDKKVEPKSCDKTHTCPPCPAPELLGGPSVFLFPPKPKDTLMISRTPEVTCVVVDVSHE
DPEVKFNWYVDGVEVHNAKTKPREEQYNSTYRVVSVLTVLHQDWLNGKEYKCKVSNKALPAPIEKTI
SKAKGQPREPQVYTLPPSREEMTKNQVSLTCLVKGFYPSDIAVEWESNGQPENNYKTTPPVLDSDGSFF
LYSKLTVDKSRWQQGNVFSCSVMHEALHNHYTQKSLSLSPGK
SEQ ID NO: 768
14071_HC [hu anti-<huCDH19> 16A4.1 (1-474)(T144L) VH]::huIgG1z
QVQLQESGPGLAKPSETLSLTCTVSGDSITSYYWSWIRQPPGKGLEWIGYIYYSGSTNYNPSLKSRVTISV
DTSKNQFSLKLSSVTAADTAVYYCARDQRRIAAAGTHFYGMDVWGQGTLVTVSSASTKGPSVFPLAPS
SKSTSGGTAALGCLVKDYFPEPVTVSWNSGALTSGVHTFPAVLQSSGLYSLSSVVTVPSSSLGTQTYICN
VNHKPSNTKVDKKVEPKSCDKTHTCPPCPAPELLGGPSVFLFPPKPKDTLMISRTPEVTCVVVDVSHEDP
EVKFNWYVDGVEVHNAKTKPREEQYNSTYRVVSVLTVLHQDWLNGKEYKCKVSNKALPAPIEKTISK
AKGQPREPQVYTLPPSREEMTKNQVSLTCLVKGFYPSDIAVEWESNGQPENNYKTTPPVLDSDGSFFLY
SKLTVDKSRWQQGNVFSCSVMHEALHNHYTQKSLSLSPGK
SEQ ID NO: 769
14072_HC [hu anti-<huCDH19> 19B5.1 VH]::huIgG1z
QVQLVQSGAEVKKPGASVKVSCKVSGYTFTSYFIHWVRQAPGQGLEWMGIINPISVSTSYAQKFQGRV
TMTRDTSTSTVFMELSSLRSEDTAVYYCARGGIQLWLHLDYWGQGTLVTVSSASTKGPSVFPLAPSSKS
TSGGTAALGCLVKDYFPEPVTVSWNSGALTSGVHTFPAVLQSSGLYSLSSVVTVPSSSLGTQTYICNVN
HKPSNTKVDKKVEPKSCDKTHTCPPCPAPELLGGPSVFLFPPKPKDTLMISRTPEVTCVVVDVSHEDPEV
KFNWYVDGVEVHNAKTKPREEQYNSTYRVVSVLTVLHQDWLNGKEYKCKVSNKALPAPIEKTISKAK
GQPREPQVYTLPPSREEMTKNQVSLTCLVKGFYPSDIAVEWESNGQPENNYKTTPPVLDSDGSFFLYSK
LTVDKSRWQQGNVFSCSVMHEALHNHYTQKSLSLSPGK
SEQ ID NO: 770
14073_HC [hu anti-<huCDH19> 19B5.1 (1-469)(W133Y) VH]::huIgG1z
QVQLVQSGAEVKKPGASVKVSCKVSGYTFTSYFIHWVRQAPGQGLEWMGIINPISVSTSYAQKFQGRV
TMTRDTSTSTVFMELSSLRSEDTAVYYCARGGIQLYLHLDYWGQGTLVTVSSASTKGPSVFPLAPSSKS
TSGGTAALGCLVKDYFPEPVTVSWNSGALTSGVHTFPAVLQSSGLYSLSSVVTVPSSSLGTQTYICNVN
HKPSNTKVDKKVEPKSCDKTHTCPPCPAPELLGGPSVFLFPPKPKDTLMISRTPEVTCVVVDVSHEDPEV
KFNWYVDGVEVHNAKTKPREEQYNSTYRVVSVLTVLHQDWLNGKEYKCKVSNKALPAPIEKTISKAK
GQPREPQVYTLPPSREEMTKNQVSLTCLVKGFYPSDIAVEWESNGQPENNYKTTPPVLDSDGSFFLYSK
LTVDKSRWQQGNVFSCSVMHEALHNHYTQKSLSLSPGK
SEQ ID NO: 771
14074_HC [hu anti-<huCDH19> 19B5.1 VH]::huIgG1z
QVQLVQSGAEVKKPGASVKVSCKVSGYTFTSYFIHWVRQAPGQGLEWMGIINPISVSTSYAQKFQGRV
TMTRDTSTSTVFMELSSLRSEDTAVYYCARGGIQLWLHLDYWGQGTLVTVSSASTKGPSVFPLAPSSKS
TSGGTAALGCLVKDYFPEPVTVSWNSGALTSGVHTFPAVLQSSGLYSLSSVVTVPSSSLGTQTYICNVN
HKPSNTKVDKKVEPKSCDKTHTCPPCPAPELLGGPSVFLFPPKPKDTLMISRTPEVTCVVVDVSHEDPEV
KFNWYVDGVEVHNAKTKPREEQYNSTYRVVSVLTVLHQDWLNGKEYKCKVSNKALPAPIEKTISKAK
GQPREPQVYTLPPSREEMTKNQVSLTCLVKGFYPSDIAVEWESNGQPENNYKTTPPVLDSDGSFFLYSK
LTVDKSRWQQGNVFSCSVMHEALHNHYTQKSLSLSPGK
SEQ ID NO: 772
14075_HC [hu anti-<huCDH19> 19B5.1 VH]::huIgG1z
QVQLVQSGAEVKKPGASVKVSCKVSGYTFTSYFIHWVRQAPGQGLEWMGIINPISVSTSYAQKFQGRV
TMTRDTSTSTVFMELSSLRSEDTAVYYCARGGIQLWLHLDYWGQGTLVTVSSASTKGPSVFPLAPSSKS
TSGGTAALGCLVKDYFPEPVTVSWNSGALTSGVHTFPAVLQSSGLYSLSSVVTVPSSSLGTQTYICNVN
HKPSNTKVDKKVEPKSCDKTHTCPPCPAPELLGGPSVFLFPPKPKDTLMISRTPEVTCVVVDVSHEDPEV
KFNWYVDGVEVHNAKTKPREEQYNSTYRVVSVLTVLHQDWLNGKEYKCKVSNKALPAPIEKTISKAK
GQPREPQVYTLPPSREEMTKNQVSLTCLVKGFYPSDIAVEWESNGQPENNYKTTPPVLDSDGSFFLYSK
LTVDKSRWQQGNVFSCSVMHEALHNHYTQKSLSLSPGK
SEQ ID NO: 773
14076_HC [hu anti-<huCDH19> 19B5.1 (1-469)(W133Y) VH]::huIgG1z
QVQLVQSGAEVKKPGASVKVSCKVSGYTFTSYFIHWVRQAPGQGLEWMGIINPISVSTSYAQKFQGRV
TMTRDTSTSTVFMELSSLRSEDTAVYYCARGGIQLYLHLDYWGQGTLVTVSSASTKGPSVFPLAPSSKS
TSGGTAALGCLVKDYFPEPVTVSWNSGALTSGVHTFPAVLQSSGLYSLSSVVTVPSSSLGTQTYICNVN
HKPSNTKVDKKVEPKSCDKTHTCPPCPAPELLGGPSVFLFPPKPKDTLMISRTPEVTCVVVDVSHEDPEV
KFNWYVDGVEVHNAKTKPREEQYNSTYRVVSVLTVLHQDWLNGKEYKCKVSNKALPAPIEKTISKAK
GQPREPQVYTLPPSREEMTKNQVSLTCLVKGFYPSDIAVEWESNGQPENNYKTTPPVLDSDGSFFLYSK
LTVDKSRWQQGNVFSCSVMHEALHNHYTQKSLSLSPGK
SEQ ID NO: 774
14077_HC [hu anti-<huCDH19> 23A10.3 (1-474)(L92Q) VH]::huIgG1z
QVQLVESGGGVVQPGRSLRLSCAASGFTFSRYGIHWVRQAPGKGLEWVAVIWYDGSNKYYADSVKGR
FTISRDNSKNTLYLQMNSLRAEDSAVYYCARRAGIPGTTGYYYGMDVWGQGTTVTVSSASTKGPSVFP
LAPSSKSTSGGTAALGCLVKDYFPEPVTVSWNSGALTSGVHTFPAVLQSSGLYSLSSVVTVPSSSLGTQT
YICNVNHKPSNTKVDKKVEPKSCDKTHTCPPCPAPELLGGPSVFLFPPKPKDTLMISRTPEVTCVVVDVS
HEDPEVKFNWYVDGVEVHNAKTKPREEQYNSTYRVVSVLTVLHQDWLNGKEYKCKVSNKALPAPIE
KTISKAKGQPREPQVYTLPPSREEMTKNQVSLTCLVKGFYPSDIAVEWESNGQPENNYKTTPPVLDSDG
SFFLYSKLTVDKSRWQQGNVFSCSVMHEALHNHYTQKSLSLSPGK
SEQ ID NO: 775
14078_HC [hu anti-<huCDH19> 23A10.3 (1-474)(R17G,L92Q) VH]::huIgG1z
QVQLVESGGGVVQPGGSLRLSCAASGFTFSRYGIHWVRQAPGKGLEWVAVIWYDGSNKYYADSVKG
RFTISRDNSKNTLYLQMNSLRAEDSAVYYCARRAGIPGTTGYYYGMDVWGQGTTVTVSSASTKGPSVF
PLAPSSKSTSGGTAALGCLVKDYFPEPVTVSWNSGALTSGVHTFPAVLQSSGLYSLSSVVTVPSSSLGTQ
TYICNVNHKPSNTKVDKKVEPKSCDKTHTCPPCPAPELLGGPSVFLFPPKPKDTLMISRTPEVTCVVVDV
SHEDPEVKFNWYVDGVEVHNAKTKPREEQYNSTYRVVSVLTVLHQDWLNGKEYKCKVSNKALPAPIE
KTISKAKGQPREPQVYTLPPSREEMTKNQVSLTCLVKGFYPSDIAVEWESNGQPENNYKTTPPVLDSDG
SFFLYSKLTVDKSRWQQGNVFSCSVMHEALHNHYTQKSLSLSPGK
SEQ ID NO: 776
14079_HC [hu anti-<huCDH19> 23A10.3 (1-474)(R17G,D61E,D72E,L92Q) VH]::huIgG1z
QVQLVESGGGVVQPGGSLRLSCAASGFTFSRYGIHWVRQAPGKGLEWVAVIWYEGSNKYYAESVKGR
FTISRDNSKNTLYLQMNSLRAEDSAVYYCARRAGIPGTTGYYYGMDVWGQGTTVTVSSASTKGPSVFP
LAPSSKSTSGGTAALGCLVKDYFPEPVTVSWNSGALTSGVHTFPAVLQSSGLYSLSSVVTVPSSSLGTQT
YICNVNHKPSNTKVDKKVEPKSCDKTHTCPPCPAPELLGGPSVFLFPPKPKDTLMISRTPEVTCVVVDVS
HEDPEVKFNWYVDGVEVHNAKTKPREEQYNSTYRVVSVLTVLHQDWLNGKEYKCKVSNKALPAPIE
KTISKAKGQPREPQVYTLPPSREEMTKNQVSLTCLVKGFYPSDIAVEWESNGQPENNYKTTPPVLDSDG
SFFLYSKLTVDKSRWQQGNVFSCSVMHEALHNHYTQKSLSLSPGK
SEQ ID NO: 777
14080_HC [hu anti-<huCDH19> 23A10.3 VH]::huIgG1z
QVQLVESGGGVVQPGRSLRLSCAASGFTFSRYGIHWVRQAPGKGLEWVAVIWYDGSNKYYADSVKGR
FTISRDNSKNTLYLLMNSLRAEDSAVYYCARRAGIPGTTGYYYGMDVWGQGTTVTVSSASTKGPSVFP
LAPSSKSTSGGTAALGCLVKDYFPEPVTVSWNSGALTSGVHTFPAVLQSSGLYSLSSVVTVPSSSLGTQT
YICNVNHKPSNTKVDKKVEPKSCDKTHTCPPCPAPELLGGPSVFLFPPKPKDTLMISRTPEVTCVVVDVS
HEDPEVKFNWYVDGVEVHNAKTKPREEQYNSTYRVVSVLTVLHQDWLNGKEYKCKVSNKALPAPIE
KTISKAKGQPREPQVYTLPPSREEMTKNQVSLTCLVKGFYPSDIAVEWESNGQPENNYKTTPPVLDSDG
SFFLYSKLTVDKSRWQQGNVFSCSVMHEALHNHYTQKSLSLSPGK
SEQ ID NO: 778
14081_HC [hu anti-<huCDH19> 25G10.1 VH]::huIgG1z
QVQLQESGPGLVKPSETLSLTCTVSGGSISGYYWSWIRQPPGKGLEWIGYIYYIGSTNYNPSLKSRVTMS
VDTSKNQFSLKLSSVTAADTAVYYCARDGSSGWYRWFDPWGQGTLVTVSSASTKGPSVFPLAPSSKST
SGGTAALGCLVKDYFPEPVTVSWNSGALTSGVHTFPAVLQSSGLYSLSSVVTVPSSSLGTQTYICNVNH
KPSNTKVDKKVEPKSCDKTHTCPPCPAPELLGGPSVFLFPPKPKDTLMISRTPEVTCVVVDVSHEDPEVK
FNWYVDGVEVHNAKTKPREEQYNSTYRVVSVLTVLHQDWLNGKEYKCKVSNKALPAPIEKTISKAKG
QPREPQVYTLPPSREEMTKNQVSLTCLVKGFYPSDIAVEWESNGQPENNYKTTPPVLDSDGSFFLYSKL
TVDKSRWQQGNVFSCSVMHEALHNHYTQKSLSLSPGK
SEQ ID NO: 779
14082_HC [hu anti-<huCDH19> 25G10.1 (1-469)(D109E,W132Y,W135Y) VH1::huIgG1z
QVQLQESGPGLVKPSETLSLTCTVSGGSISGYYWSWIRQPPGKGLEWIGYIYYIGSTNYNPSLKSRVTMS
VDTSKNQFSLKLSSVTAADTAVYYCAREGSSGYYRYFDPWGQGTLVTVSSASTKGPSVFPLAPSSKSTS
GGTAALGCLVKDYFPEPVTVSWNSGALTSGVHTFPAVLQSSGLYSLSSVVTVPSSSLGTQTYICNVNHK
PSNTKVDKKVEPKSCDKTHTCPPCPAPELLGGPSVFLFPPKPKDTLMISRTPEVTCVVVDVSHEDPEVKF
NWYVDGVEVHNAKTKPREEQYNSTYRVVSVLTVLHQDWLNGKEYKCKVSNKALPAPIEKTISKAKGQ
PREPQVYTLPPSREEMTKNQVSLTCLVKGFYPSDIAVEWESNGQPENNYKTTPPVLDSDGSFFLYSKLT
VDKSRWQQGNVFSCSVMHEALHNHYTQKSLSLSPGK
SEQ ID NO: 780
14083_HC [hu anti-<huCDH19> 26D1.1 VH]::huIgG1z
QVQLVQSGAEVKKPGASVKVSCKASRYTFTSYYMSWVRQAPGQGLEWMGIIHPSGGDTTYAQKFQGR
VTMTGDTSTSTVYMELSSLRSEDTAVYYCARGGIKLWLHFDYWGQGTLVTVSSASTKGPSVFPLAPSS
KSTSGGTAALGCLVKDYFPEPVTVSWNSGALTSGVHTFPAVLQSSGLYSLSSVVTVPSSSLGTQTYICNV
NHKPSNTKVDKKVEPKSCDKTHTCPPCPAPELLGGPSVFLFPPKPKDTLMISRTPEVTCVVVDVSHEDPE
VKFNWYVDGVEVHNAKTKPREEQYNSTYRVVSVLTVLHQDWLNGKEYKCKVSNKALPAPIEKTISKA
KGQPREPQVYTLPPSREEMTKNQVSLTCLVKGFYPSDIAVEWESNGQPENNYKTTPPVLDSDGSEFLYS
KLTVDKSRWQQGNVFSCSVMHEALHNHYTQKSLSLSPGK
SEQ ID NO: 781
14084_HC [hu anti-<huCDH19> 26D1.1 VH]::huIgG1z
QVQLVQSGAEVKKPGASVKVSCKASRYTFTSYYMSWVRQAPGQGLEWMGIIHPSGGDTTYAQKFQGR
VTMTGDTSTSTVYMELSSLRSEDTAVYYCARGGIKLWLHFDYWGQGTLVTVSSASTKGPSVFPLAPSS
KSTSGGTAALGCLVKDYFPEPVTVSWNSGALTSGVHTFPAVLQSSGLYSLSSVVTVPSSSLGTQTYICNV
NHKPSNTKVDKKVEPKSCDKTHTCPPCPAPELLGGPSVFLFPPKPKDTLMISRTPEVTCVVVDVSHEDPE
VKFNWYVDGVEVHNAKTKPREEQYNSTYRVVSVLTVLHQDWLNGKEYKCKVSNKALPAPIEKTISKA
KGQPREPQVYTLPPSREEMTKNQVSLTCLVKGFYPSDIAVEWESNGQPENNYKTTPPVLDSDGSEFLYS
KLTVDKSRWQQGNVFSCSVMHEALHNHYTQKSLSLSPGK
SEQ ID NO: 782
14085_HC [hu anti-<huCDH19> 26D1.1 VH]::huIgG1z
QVQLVQSGAEVKKPGASVKVSCKASRYTFTSYYMSWVRQAPGQGLEWMGIIHPSGGDTTYAQKFQGR
VTMTGDTSTSTVYMELSSLRSEDTAVYYCARGGIKLWLHFDYWGQGTLVTVSSASTKGPSVFPLAPSS
KSTSGGTAALGCLVKDYFPEPVTVSWNSGALTSGVHTFPAVLQSSGLYSLSSVVTVPSSSLGTQTYICNV
NHKPSNTKVDKKVEPKSCDKTHTCPPCPAPELLGGPSVFLFPPKPKDTLMISRTPEVTCVVVDVSHEDPE
VKFNWYVDGVEVHNAKTKPREEQYNSTYRVVSVLTVLHQDWLNGKEYKCKVSNKALPAPIEKTISKA
KGQPREPQVYTLPPSREEMTKNQVSLTCLVKGFYPSDIAVEWESNGQPENNYKTTPPVLDSDGSEFLYS
KLTVDKSRWQQGNVFSCSVMHEALHNHYTQKSLSLSPGK
SEQ ID NO: 783
14086_HC [hu anti-<huCDH19> 26D1.1 VH1::huIgG1z
QVQLVQSGAEVKKPGASVKVSCKASRYTFTSYYMSWVRQAPGQGLEWMGIIHPSGGDTTYAQKFQGR
VTMTGDTSTSTVYMELSSLRSEDTAVYYCARGGIKLWLHFDYWGQGTLVTVSSASTKGPSVFPLAPSS
KSTSGGTAALGCLVKDYFPEPVTVSWNSGALTSGVHTFPAVLQSSGLYSLSSVVTVPSSSLGTQTYICNV
NHKPSNTKVDKKVEPKSCDKTHTCPPCPAPELLGGPSVFLFPPKPKDTLMISRTPEVTCVVVDVSHEDPE
VKFNWYVDGVEVHNAKTKPREEQYNSTYRVVSVLTVLHQDWLNGKEYKCKVSNKALPAPIEKTISKA
KGQPREPQVYTLPPSREEMTKNQVSLTCLVKGFYPSDIAVEWESNGQPENNYKTTPPVLDSDGSEFLYS
KLTVDKSRWQQGNVFSCSVMHEALHNHYTQKSLSLSPGK
SEQ ID NO: 784
14087_HC [hu anti-<huCDH19> 26D1.1 (1-469)(W133Y) VH1::huIgG1z
QVQLVQSGAEVKKPGASVKVSCKASRYTFTSYYMSWVRQAPGQGLEWMGIIHPSGGDTTYAQKFQGR
VTMTGDTSTSTVYMELSSLRSEDTAVYYCARGGIKLYLHFDYWGQGTLVTVSSASTKGPSVFPLAPSSK
STSGGTAALGCLVKDYFPEPVTVSWNSGALTSGVHTFPAVLQSSGLYSLSSVVTVPSSSLGTQTYICNVN
HKPSNTKVDKKVEPKSCDKTHTCPPCPAPELLGGPSVFLFPPKPKDTLMISRTPEVTCVVVDVSHEDPEV
KFNWYVDGVEVHNAKTKPREEQYNSTYRVVSVLTVLHQDWLNGKEYKCKVSNKALPAPIEKTISKAK
GQPREPQVYTLPPSREEMTKNQVSLTCLVKGFYPSDIAVEWESNGQPENNYKTTPPVLDSDGSEFLYSK
LTVDKSRWQQGNVFSCSVMHEALHNHYTQKSLSLSPGK
SEQ ID NO: 785
14088_HC [hu anti-<huCDH19> 26D1.1 (1-469)(R27G,G82R) VH]::huIgG1z
QVQLVQSGAEVKKPGASVKVSCKASGYTFTSYYMSWVRQAPGQGLEWMGIIHPSGGDTTYAQKFQGR
VTMTRDTSTSTVYMELSSLRSEDTAVYYCARGGIKLWLHFDYWGQGTLVTVSSASTKGPSVFPLAPSS
KSTSGGTAALGCLVKDYFPEPVTVSWNSGALTSGVHTFPAVLQSSGLYSLSSVVTVPSSSLGTQTYICNV
NHKPSNTKVDKKVEPKSCDKTHTCPPCPAPELLGGPSVFLFPPKPKDTLMISRTPEVTCVVVDVSHEDPE
VKFNWYVDGVEVHNAKTKPREEQYNSTYRVVSVLTVLHQDWLNGKEYKCKVSNKALPAPIEKTISKA
KGQPREPQVYTLPPSREEMTKNQVSLTCLVKGFYPSDIAVEWESNGQPENNYKTTPPVLDSDGSEFLYS
KLTVDKSRWQQGNVFSCSVMHEALHNHYTQKSLSLSPGK
SEQ ID NO: 786
14089_HC [hu anti-<huCDH19> 26F12.1 VH]::huIgG1z
QVQLVQSGAEVKKPGASVKVSCKASRYTFTNYYMSWVRQAPGQGLEWMGIINPSGGDSTYAQKFQG
RLTMTGDTSTSTVYMELSSLRSEDTAVYYCARGGIQLWLHFDYWGQGTLVTVSSASTKGPSVFPLAPSS
KSTSGGTAALGCLVKDYFPEPVTVSWNSGALTSGVHTFPAVLQSSGLYSLSSVVTVPSSSLGTQTYICNV
NHKPSNTKVDKKVEPKSCDKTHTCPPCPAPELLGGPSVFLFPPKPKDTLMISRTPEVTCVVVDVSHEDPE
VKFNWYVDGVEVHNAKTKPREEQYNSTYRVVSVLTVLHQDWLNGKEYKCKVSNKALPAPIEKTISKA
KGQPREPQVYTLPPSREEMTKNQVSLTCLVKGFYPSDIAVEWESNGQPENNYKTTPPVLDSDGSEFLYS
KLTVDKSRWQQGNVFSCSVMHEALHNHYTQKSLSLSPGK
SEQ ID NO: 787
14090_HC [hu anti-<huCDH19> 26F12.1 VH]::huIgG1z
QVQLVQSGAEVKKPGASVKVSCKASRYTFTNYYMSWVRQAPGQGLEWMGIINPSGGDSTYAQKFQG
RLTMTGDTSTSTVYMELSSLRSEDTAVYYCARGGIQLWLHFDYWGQGTLVTVSSASTKGPSVFPLAPSS
KSTSGGTAALGCLVKDYFPEPVTVSWNSGALTSGVHTFPAVLQSSGLYSLSSVVTVPSSSLGTQTYICNV
NHKPSNTKVDKKVEPKSCDKTHTCPPCPAPELLGGPSVFLFPPKPKDTLMISRTPEVTCVVVDVSHEDPE
VKFNWYVDGVEVHNAKTKPREEQYNSTYRVVSVLTVLHQDWLNGKEYKCKVSNKALPAPIEKTISKA
KGQPREPQVYTLPPSREEMTKNQVSLTCLVKGFYPSDIAVEWESNGQPENNYKTTPPVLDSDGSEFLYS
KLTVDKSRWQQGNVFSCSVMHEALHNHYTQKSLSLSPGK
SEQ ID NO: 788
14091_HC [hu anti-<huCDH19> 26F12.1 (1-469)(W133Y) VH]::huIgG1z
QVQLVQSGAEVKKPGASVKVSCKASRYTFTNYYMSWVRQAPGQGLEWMGIINPSGGDSTYAQKFQG
RLTMTGDTSTSTVYMELSSLRSEDTAVYYCARGGIQLYLHFDYWGQGTLVTVSSASTKGPSVFPLAPSS
KSTSGGTAALGCLVKDYFPEPVTVSWNSGALTSGVHTFPAVLQSSGLYSLSSVVTVPSSSLGTQTYICNV
NHKPSNTKVDKKVEPKSCDKTHTCPPCPAPELLGGPSVFLFPPKPKDTLMISRTPEVTCVVVDVSHEDPE
VKFNWYVDGVEVHNAKTKPREEQYNSTYRVVSVLTVLHQDWLNGKEYKCKVSNKALPAPIEKTISKA
KGQPREPQVYTLPPSREEMTKNQVSLTCLVKGFYPSDIAVEWESNGQPENNYKTTPPVLDSDGSEFLYS
KLTVDKSRWQQGNVFSCSVMHEALHNHYTQKSLSLSPGK
SEQ ID NO: 789
14092_HC [hu anti-<huCDH19> 26F12.1 (1-469)(W133Y) VH1::huIgG1z
QVQLVQSGAEVKKPGASVKVSCKASRYTFTNYYMSWVRQAPGQGLEWMGIINPSGGDSTYAQKFQG
RLTMTGDTSTSTVYMELS SLRSEDTAVYYCARGGIQLYLHFDYWGQGTLVTVSSASTKGPSVFPLAPSS
KSTSGGTAALGCLVKDYFPEPVTVSWNSGALTSGVHTFPAVLQSSGLYSLSSVVTVPSSSLGTQTYICNV
NHKPSNTKVDKKVEPKSCDKTHTCPPCPAPELLGGPSVFLFPPKPKDTLMISRTPEVTCVVVDVSHEDPE
VKFNWYVDGVEVHNAKTKPREEQYNSTYRVVSVLTVLHQDWLNGKEYKCKVSNKALPAPIEKTISKA
KGQPREPQVYTLPPSREEMTKNQVSLTCLVKGFYPSDIAVEWESNGQPENNYKTTPPVLDSDGSEFLYS
KLTVDKSRWQQGNVFSCSVMHEALHNHYTQKSLSLSPGK
SEQ ID NO: 790
14093_HC [hu anti-<huCDH19> 25F8.1 VH]::huIgG1z
QVQLVQSGAEVKKPGASVKVSCKASGYTFTSYYIHWVRQAPGQGLEWMGIINPSGGSTRYAQKFQGR
VTMTRDTSTSTVFMELSSLRSEDTAVYYCARGGIQLWLHFDYWGQGTLVTVSSASTKGPSVFPLAPSSK
STSGGTAALGCLVKDYFPEPVTVSWNSGALTSGVHTFPAVLQSSGLYSLSSVVTVPSSSLGTQTYICNVN
HKPSNTKVDKKVEPKSCDKTHTCPPCPAPELLGGPSVFLFPPKPKDTLMISRTPEVTCVVVDVSHEDPEV
KFNWYVDGVEVHNAKTKPREEQYNSTYRVVSVLTVLHQDWLNGKEYKCKVSNKALPAPIEKTISKAK
GQPREPQVYTLPPSREEMTKNQVSLTCLVKGFYPSDIAVEWESNGQPENNYKTTPPVLDSDGSEFLYSK
LTVDKSRWQQGNVFSCSVMHEALHNHYTQKSLSLSPGK
SEQ ID NO: 791
14094_HC [hu anti-<huCDH19> 25F8.1 VH1::huIgG1z
QVQLVQSGAEVKKPGASVKVSCKASGYTFTSYYIHWVRQAPGQGLEWMGIINPSGGSTRYAQKFQGR
VTMTRDTSTSTVFMELSSLRSEDTAVYYCARGGIQLWLHFDYWGQGTLVTVSSASTKGPSVFPLAPSSK
STSGGTAALGCLVKDYFPEPVTVSWNSGALTSGVHTFPAVLQSSGLYSLSSVVTVPSSSLGTQTYICNVN
HKPSNTKVDKKVEPKSCDKTHTCPPCPAPELLGGPSVFLFPPKPKDTLMISRTPEVTCVVVDVSHEDPEV
KFNWYVDGVEVHNAKTKPREEQYNSTYRVVSVLTVLHQDWLNGKEYKCKVSNKALPAPIEKTISKAK
GQPREPQVYTLPPSREEMTKNQVSLTCLVKGFYPSDIAVEWESNGQPENNYKTTPPVLDSDGSFFLYSK
LTVDKSRWQQGNVFSCSVMHEALHNHYTQKSLSLSPGK
SEQ ID NO: 792
14095_HC [hu anti-<huCDH19> 25F8.1 (1-469)(F90Y) VH]::huIgG1z
QVQLVQSGAEVKKPGASVKVSCKASGYTFTSYYIHWVRQAPGQGLEWMGIINPSGGSTRYAQKFQGR
VTMTRDTSTSTVYMELSSLRSEDTAVYYCARGGIQLWLHFDYWGQGTLVTVSSASTKGPSVFPLAPSS
KSTSGGTAALGCLVKDYFPEPVTVSWNSGALTSGVHTFPAVLQSSGLYSLSSVVTVPSSSLGTQTYICNV
NHKPSNTKVDKKVEPKSCDKTHTCPPCPAPELLGGPSVFLFPPKPKDTLMISRTPEVTCVVVDVSHEDPE
VKFNWYVDGVEVHNAKTKPREEQYNSTYRVVSVLTVLHQDWLNGKEYKCKVSNKALPAPIEKTISKA
KGQPREPQVYTLPPSREEMTKNQVSLTCLVKGFYPSDIAVEWESNGQPENNYKTTPPVLDSDGSFFLYS
KLTVDKSRWQQGNVFSCSVMHEALHNHYTQKSLSLSPGK
SEQ ID NO: 793
14096_HC [hu anti-<huCDH19> 25F8.1 (1-469)(F90Y) VH]::huIgG1z
QVQLVQSGAEVKKPGASVKVSCKASGYTFTSYYIHWVRQAPGQGLEWMGIINPSGGSTRYAQKFQGR
VTMTRDTSTSTVYMELSSLRSEDTAVYYCARGGIQLWLHFDYWGQGTLVTVSSASTKGPSVFPLAPSS
KSTSGGTAALGCLVKDYFPEPVTVSWNSGALTSGVHTFPAVLQSSGLYSLSSVVTVPSSSLGTQTYICNV
NHKPSNTKVDKKVEPKSCDKTHTCPPCPAPELLGGPSVFLFPPKPKDTLMISRTPEVTCVVVDVSHEDPE
VKFNWYVDGVEVHNAKTKPREEQYNSTYRVVSVLTVLHQDWLNGKEYKCKVSNKALPAPIEKTISKA
KGQPREPQVYTLPPSREEMTKNQVSLTCLVKGFYPSDIAVEWESNGQPENNYKTTPPVLDSDGSEFLYS
KLTVDKSRWQQGNVFSCSVMHEALHNHYTQKSLSLSPGK
SEQ ID NO: 794
14097_HC [hu anti-<huCDH19> 25F8.1 (1-469)(F90Y,W133Y) VH]::huIgG1z
QVQLVQSGAEVKKPGASVKVSCKASGYTFTSYYIHWVRQAPGQGLEWMGIINPSGGSTRYAQKFQGR
VTMTRDTSTSTVYMELSSLRSEDTAVYYCARGGIQLYLHFDYWGQGTLVTVSSASTKGPSVFPLAPSSK
STSGGTAALGCLVKDYFPEPVTVSWNSGALTSGVHTFPAVLQSSGLYSLSSVVTVPSSSLGTQTYICNVN
HKPSNTKVDKKVEPKSCDKTHTCPPCPAPELLGGPSVFLFPPKPKDTLMISRTPEVTCVVVDVSHEDPEV
KFNWYVDGVEVHNAKTKPREEQYNSTYRVVSVLTVLHQDWLNGKEYKCKVSNKALPAPIEKTISKAK
GQPREPQVYTLPPSREEMTKNQVSLTCLVKGFYPSDIAVEWESNGQPENNYKTTPPVLDSDGSFFLYSK
LTVDKSRWQQGNVFSCSVMHEALHNHYTQKSLSLSPGK
SEQ ID NO: 795
14098_HC [hu anti-<huCDH19> 22D1.1 VH]::huIgG1z
QVQLVQSGAEVKKPGASVRVSCKVSGYTFTSYFIHWVRQAPGQGLEWMGIINPISVSTSYAQKFQGRV
TMTRDTSTSTVFMELSSLRSEDTAVYYCARGGIQLWLHLDYWGQGTLVTVSSASTKGPSVFPLAPSSKS
TSGGTAALGCLVKDYFPEPVTVSWNSGALTSGVHTFPAVLQSSGLYSLSSVVTVPSSSLGTQTYICNVN
HKPSNTKVDKKVEPKSCDKTHTCPPCPAPELLGGPSVFLFPPKPKDTLMISRTPEVTCVVVDVSHEDPEV
KFNWYVDGVEVHNAKTKPREEQYNSTYRVVSVLTVLHQDWLNGKEYKCKVSNKALPAPIEKTISKAK
GQPREPQVYTLPPSREEMTKNQVSLTCLVKGFYPSDIAVEWESNGQPENNYKTTPPVLDSDGSFFLYSK
LTVDKSRWQQGNVFSCSVMHEALHNHYTQKSLSLSPGK
SEQ ID NO: 796
14099_HC [hu anti-<huCDH19> 22D1.1 VH]::huIgG1z
QVQLVQSGAEVKKPGASVRVSCKVSGYTFTSYFIHWVRQAPGQGLEWMGIINPISVSTSYAQKFQGRV
TMTRDTSTSTVFMELSSLRSEDTAVYYCARGGIQLWLHLDYWGQGTLVTVSSASTKGPSVFPLAPSSKS
TSGGTAALGCLVKDYFPEPVTVSWNSGALTSGVHTFPAVLQSSGLYSLSSVVTVPSSSLGTQTYICNVN
HKPSNTKVDKKVEPKSCDKTHTCPPCPAPELLGGPSVFLFPPKPKDTLMISRTPEVTCVVVDVSHEDPEV
KFNWYVDGVEVHNAKTKPREEQYNSTYRVVSVLTVLHQDWLNGKEYKCKVSNKALPAPIEKTISKAK
GQPREPQVYTLPPSREEMTKNQVSLTCLVKGFYPSDIAVEWESNGQPENNYKTTPPVLDSDGSFFLYSK
LTVDKSRWQQGNVFSCSVMHEALHNHYTQKSLSLSPGK
SEQ ID NO: 797
14100_HC [hu anti-<huCDH19> 22D1.1 (1-469)(W133Y) VH]::huIgG1z
QVQLVQSGAEVKKPGASVRVSCKVSGYTFTSYFIHWVRQAPGQGLEWMGIINPISVSTSYAQKFQGRV
TMTRDTSTSTVFMELSSLRSEDTAVYYCARGGIQLYLHLDYWGQGTLVTVSSASTKGPSVFPLAPSSKS
TSGGTAALGCLVKDYFPEPVTVSWNSGALTSGVHTFPAVLQSSGLYSLSSVVTVPSSSLGTQTYICNVN
HKPSNTKVDKKVEPKSCDKTHTCPPCPAPELLGGPSVFLEPPKPKDTLMISRTPEVTCVVVDVSHEDPEV
KFNWYVDGVEVHNAKTKPREEQYNSTYRVVSVLTVLHQDWLNGKEYKCKVSNKALPAPIEKTISKAK
GQPREPQVYTLPPSREEMTKNQVSLTCLVKGFYPSDIAVEWESNGQPENNYKTTPPVLDSDGSFFLYSK
LTVDKSRWQQGNVFSCSVMHEALHNHYTQKSLSLSPGK
SEQ ID NO: 798
14101_HC [hu anti-<huCDH19> 22D1.1 (1-469)(W133Y) VH]::huIgG1z
QVQLVQSGAEVKKPGASVRVSCKVSGYTFTSYFIHWVRQAPGQGLEWMGIINPISVSTSYAQKFQGRV
TMTRDTSTSTVFMELSSLRSEDTAVYYCARGGIQLYLHLDYWGQGTLVTVSSASTKGPSVFPLAPSSKS
TSGGTAALGCLVKDYFPEPVTVSWNSGALTSGVHTFPAVLQSSGLYSLSSVVTVPSSSLGTQTYICNVN
HKPSNTKVDKKVEPKSCDKTHTCPPCPAPELLGGPSVFLEPPKPKDTLMISRTPEVTCVVVDVSHEDPEV
KFNWYVDGVEVHNAKTKPREEQYNSTYRVVSVLTVLHQDWLNGKEYKCKVSNKALPAPIEKTISKAK
GQPREPQVYTLPPSREEMTKNQVSLTCLVKGFYPSDIAVEWESNGQPENNYKTTPPVLDSDGSFFLYSK
LTVDKSRWQQGNVFSCSVMHEALHNHYTQKSLSLSPGK
SEQ ID NO: 799
14102_HC [hu anti-<huCDH19> 22D1.1 (1-469)(F90Y) VH]::huIgG1z
QVQLVQSGAEVKKPGASVRVSCKVSGYTFTSYFIHWVRQAPGQGLEWMGIINPISVSTSYAQKFQGRV
TMTRDTSTSTVYMELSSLRSEDTAVYYCARGGIQLWLHLDYWGQGTLVTVSSASTKGPSVFPLAPSSKS
TSGGTAALGCLVKDYFPEPVTVSWNSGALTSGVHTFPAVLQSSGLYSLSSVVTVPSSSLGTQTYICNVN
HKPSNTKVDKKVEPKSCDKTHTCPPCPAPELLGGPSVFLEPPKPKDTLMISRTPEVTCVVVDVSHEDPEV
KFNWYVDGVEVHNAKTKPREEQYNSTYRVVSVLTVLHQDWLNGKEYKCKVSNKALPAPIEKTISKAK
GQPREPQVYTLPPSREEMTKNQVSLTCLVKGFYPSDIAVEWESNGQPENNYKTTPPVLDSDGSFFLYSK
LTVDKSRWQQGNVFSCSVMHEALHNHYTQKSLSLSPGK
SEQ ID NO: 800
13591_HC [hu anti-<huCDH19> 4F7 VH]::huIgG1z
QVQLQESGPGLVKPSETLSLTCTVSGGSISSYSWSWIRQPPGKGLEWIGYIYYSGSTNYNPSLKSRVTISL
DTSKNQFSLKLSSVTAADTAVYYCARNWAFHFDYWGQGTLVTVSSASTKGPSVFPLAPSSKSTSGGTA
ALGCLVKDYFPEPVTVSWNSGALTSGVHTFPAVLQSSGLYSLSSVVTVPSSSLGTQTYICNVNHKPSNT
KVDKKVEPKSCDKTHTCPPCPAPELLGGPSVFLFPPKPKDTLMISRTPEVTCVVVDVSHEDPEVKFNWY
VDGVEVHNAKTKPREEQYNSTYRVVSVLTVLHQDWLNGKEYKCKVSNKALPAPIEKTISKAKGQPREP
QVYTLPPSREEMTKNQVSLTCLVKGFYPSDIAVEWESNGQPENNYKTTPPVLDSDGSFFLYSKLTVDKS
RWQQGNVFSCSVMHEALHNHYTQKSLSLSPGK
SEQ ID NO: 801
14301_HC [hu anti-<huCDH19> 2G6 VH]::huIgG1z
QVQLVESGGGVVQPGRSLRLSCAASGFTESSYGMHWVRQAPGKGLEWVAFIWYDGSNKYYADSVKD
RFTISRDNSKNTLYLQMKSLRAEDTAVYYCARRAGIIGTIGYYYGMDVWGQGTTVTVSSASTKGPSVFP
LAPSSKSTSGGTAALGCLVKDYFPEPVTVSWNSGALTSGVHTFPAVLQSSGLYSLSSVVTVPSSSLGTQT
YICNVNHKPSNTKVDKKVEPKSCDKTHTCPPCPAPELLGGPSVFLFPPKPKDTLMISRTPEVTCVVVDVS
HEDPEVKFNWYVDGVEVHNAKTKPREEQYNSTYRVVSVLTVLHQDWLNGKEYKCKVSNKALPAPIE
KTISKAKGQPREPQVYTLPPSREEMTKNQVSLTCLVKGFYPSDIAVEWESNGQPENNYKTTPPVLDSDG
SFFLYSKLTVDKSRWQQGNVFSCSVMHEALHNHYTQKSLSLSPGK
SEQ ID NO: 802
14302_HC [hu anti-<huCDH19> 2G6 (1-477)(R17G,K94N) VH]::huIgG1z
QVQLVESGGGVVQPGGSLRLSCAASGFTFSSYGMHWVRQAPGKGLEWVAFIWYDGSNKYYADSVKD
RFTISRDNSKNTLYLQMNSLRAEDTAVYYCARRAGIIGTIGYYYGMDVWGQGTTVTVSSASTKGPSVFP
LAPSSKSTSGGTAALGCLVKDYFPEPVTVSWNSGALTSGVHTFPAVLQSSGLYSLSSVVTVPSSSLGTQT
YICNVNHKPSNTKVDKKVEPKSCDKTHTCPPCPAPELLGGPSVFLEPPKPKDTLMISRTPEVTCVVVDVS
HEDPEVKFNWYVDGVEVHNAKTKPREEQYNSTYRVVSVLTVLHQDWLNGKEYKCKVSNKALPAPIE
KTISKAKGQPREPQVYTLPPSREEMTKNQVSLTCLVKGFYPSDIAVEWESNGQPENNYKTTPPVLDSDG
SFFLYSKLTVDKSRWQQGNVFSCSVMHEALHNHYTQKSLSLSPGK
SEQ ID NO: 803
14303_HC [hu anti-<huCDH19> 2G6 (1-477)(D61E,D72E) VH]::huIgG1z
QVQLVESGGGVVQPGRSLRLSCAASGFTFSSYGMHWVRQAPGKGLEWVAFIWYEGSNKYYAESVKD
RFTISRDNSKNTLYLQMKSLRAEDTAVYYCARRAGIIGTIGYYYGMDVWGQGTTVTVSSASTKGPSVFP
LAPSSKSTSGGTAALGCLVKDYFPEPVTVSWNSGALTSGVHTFPAVLQSSGLYSLSSVVTVPSSSLGTQT
YICNVNHKPSNTKVDKKVEPKSCDKTHTCPPCPAPELLGGPSVFLFPPKPKDTLMISRTPEVTCVVVDVS
HEDPEVKFNWYVDGVEVHNAKTKPREEQYNSTYRVVSVLTVLHQDWLNGKEYKCKVSNKALPAPIE
KTISKAKGQPREPQVYTLPPSREEMTKNQVSLTCLVKGFYPSDIAVEWESNGQPENNYKTTPPVLDSDG
SFFLYSKLTVDKSRWQQGNVFSCSVMHEALHNHYTQKSLSLSPGK
SEQ ID NO: 804
14304_HC [hu anti-<huCDH19> 2G6 (1-477)(R17G) VH]::huIgG1z
QVQLVESGGGVVQPGGSLRLSCAASGFTFSSYGMHWVRQAPGKGLEWVAFIWYDGSNKYYADSVKD
RFTISRDNSKNTLYLQMKSLRAEDTAVYYCARRAGIIGTIGYYYGMDVWGQGTTVTVSSASTKGPSVFP
LAPSSKSTSGGTAALGCLVKDYFPEPVTVSWNSGALTSGVHTFPAVLQSSGLYSLSSVVTVPSSSLGTQT
YICNVNHKPSNTKVDKKVEPKSCDKTHTCPPCPAPELLGGPSVFLEPPKPKDTLMISRTPEVTCVVVDVS
HEDPEVKFNWYVDGVEVHNAKTKPREEQYNSTYRVVSVLTVLHQDWLNGKEYKCKVSNKALPAPIE
KTISKAKGQPREPQVYTLPPSREEMTKNQVSLTCLVKGFYPSDIAVEWESNGQPENNYKTTPPVLDSDG
SFFLYSKLTVDKSRWQQGNVFSCSVMHEALHNHYTQKSLSLSPGK
SEQ ID NO: 805

TABLE IIId
Light Chain Variable and Contant Region Polynucleotide and Amino acid Sequences

13586_LC [hu anti-<huCDH19> 4F3 VL]::huKLC
EIVLTQSPGTLSLSPGERATLSCRASQSVSSSYLAWYQQKPGQAPRLLIYGASSRATGIPDRFSGSGSGTD
FTLTISRLEPEDFAVYYCQQYGSSWTFGQGTKVEIKRTVAAPSVFIFPPSDEQLKSGTASVVCLLNNFYP
REAKVQWKVDNALQSGNSQESVTEQDSKDSTYSLSSTLTLSKADYEKHKVYACEVTHQGLSSPVTKSF
NRGEC
SEQ ID NO: 806
13589_LC [hu anti-<huCDH19> 4A9 VL]::huLLC-C1
QSVLTQPPSVSGAPGQRVTISCTGSSSNIGTGYAVHWYQQFPGTAPKLLIYGNNNRPSGVPDRFSGSKSG
TSASLAITGLQAEDEADYYCQSYDSRLSGWVFGGGTKLTVLGQPKANPTVTLFPPSSEELQANKATLVC
LISDFYPGAVTVAWKADGSPVKAGVETTKPSKQSNNKYAASSYLSLTPEQWKSHRSYSCQVTHEGSTV
EKTVAPTECS
SEQ ID NO: 807
13590_LC [hu anti-<huCDH19> 4B10 VL]::huKLC
EIVLTQSPGTLSLSPGERATLSCRASQSVSNTYLAWYHQRPGQAPRLLIYGASSRATGIPDRFSGSGSGTD
FALTISSLEPEDFAVYYCQQYSNSWTFGQGTKVEIKRTVAAPSVFIFPPSDEQLKSGTASVVCLLNNFYP
REAKVQWKVDNALQSGNSQESVTEQDSKDSTYSLSSTLTLSKADYEKHKVYACEVTHQGLSSPVTKSF
NRGEC
SEQ ID NO: 808
13874_LC [hu anti-<huCDH19> 17H8.2 VL]::huKLC
DIVLTQSPGTLSLSPGERATLSCRASQSVAGSYLAWYQQKPGQAPRLLISGASSRATGIPDRFSGSGSGT
DFTLTISRLEPEDFAVYYCQQYGKSPITFGQGTRLEMKGTVAAPSVFIFPPSDEQLKSGTASVVCLLNNF
YPREAKVQWKVDNALQSGNSQESVTEQDSKDSTYSLSSTLTLSKADYEKHKVYACEVTHQGLSSPVTK
SFNRGEC
SEQ ID NO: 809
13875_LC [hu anti-<huCDH19> 16C1.1 VL]::huKLC
EIVLTQSPGTLSLSPGERATLSCRASQSVSSSYLAWYQQKPGQAPRLLIFGASSRATGIPDRFSGSGSGTD
FTLTISGLEPEDFAVYHCQQYGNSPLTFGGGTKVEIKRTVAAPSVFIFPPSDEQLKSGTASVVCLLNNFYP
REAKVQWKVDNALQSGNSQESVTEQDSKDSTYSLSSTLTLSKADYEKHKVYACEVTHQGLSSPVTKSF
NRGEC
SEQ ID NO: 810
13876_LC [hu anti-<huCDH19> 16A4.1 VL]::huKLC
EIVLTQSPGTLSLSPGERATLSCRASQSVSSSYLAWYQQKPGQAPRLLIYGTSSRATGIPDRFSGSGSGTD
FTLTISRLEPEDFAVYYCQQYGSSPFTFGGGTKVEIKRTVAAPSVFIFPPSDEQLKSCTASVVCLLNNFYP
REAKVQWKVDNALQSGNSQESVTEQDSKDSTYSLSSTLTLSKADYEKHKVYACEVTHQGLSSPVTKSF
NRGEC
SEQ ID NO: 811
13877_LC [hu anti-<huCDH19> 22G10.1 VL]::huKLC
EIVMTQSPVTLSLSLGERATLSCRASQSISSNLAWFQQKPGQAPRLLIYGAFTRATGIPARVSGSGSGTEF
TLTISSLQSEDFAVYYCQQYNYWPLTFGGGTKVEIKRTVAAPSVFIFPPSDEQLKSGTASVVCLLNNFYP
REAKVQWKVDNALQSGNSQESVTEQDSKDSTYSLSSTLTLSKADYEKHKVYACEVTHQGLSSPVTKSF
NRGEC
SEQ ID NO: 812
13878_LC [hu anti-<huCDH19> 20D3.1 VL]::huLLC-C2
QSALTQPPSATGTPGQRVTISCSGSSSNIGSNFVNWYKQLPGTAPKVLIYTNNQRPSGVPDRFSGSKSGTS
ASLAISGLQSEDESDYYCATWDDSLNGWVFGGGTKLTVLGQPKAAPSVTLFPPSSEELQANKATLVCLI
SDFYPGAVTVAWKADSSPVKAGVETTTPSKQSNNKYAASSYLSLTPEQWKSHRSYSCQVTHEGSTVEK
TVAPTECS
SEQ ID NO: 813
13879_LC [hu anti-<huCDH19> 22D1.1 VL]::huLLC-C2
QSALTQPPSATGTPGQRVTISCSGSSSNIGSNFVNWYKQLPGTAPKVLIYTNNQRPSGVPDRFSGSKSGTS
ASLAISGLQSEDESDYYCATWDDSMNGWVFGGGTKLTVLGQPKAAPSVTLFPPSSEELQANKATLVCLI
SDFYPGAVTVAWKADSSPVKAGVETTTPSKQSNNKYAASSYLSLTPEQWKSHRSYSCQVTHEGSTVEK
TVAPTECS
SEQ ID NO: 814
13880_LC [hu anti-<huCDH19> 25F8.1 VL]::huLLC-C2
QSALTQPPSATGTPGQRVTISCSGSSSNIGRNFVNWYKQLPGTAPKVLIYTNNQRPSGVPDRFSGSKSGT
SASLAISGLQSEDESDYYCAAWDDSLNGWVFGGGTKLTVLGQPKAAPSVTLFPPSSEELQANKATLVC
LISDFYPGAVTVAWKADSSPVKAGVETTTPSKQSNNKYAASSYLSLTPEQWKSHRSYSCQVTHEGSTV
EKTVAPTECS
SEQ ID NO: 815
13881_LC [hu anti-<huCDH19> 26F12.1 VL]::huLLC-C2
QSVLTQSPSASGTPGQKVTISCSGSRSNIGSNFVNWYQQLPGTAPKLLIYTNYQRPSGVPDRFSGSKSGTS
ASLAISGLQSEDEADYYCAVWDDSLNGWVFGGGTKLTVLGQPKAAPSVTLFPPSSEELQANKATLVCLI
SDFYPGAVTVAWKADSSPVKAGVETTTPSKQSNNKYAASSYLSLTPEQWKSHRSYSCQVTHEGSTVEK
TVAPTECS
SEQ ID NO: 816
13882_LC [hu anti-<huCDH19> 26D1.1 VL]::huLLC-C2
HSVLTQSPSASGTPGQRVTISCSGSRSNIGSNFVNWYQQLPGTAPKLLIYTNNQRPSGVPDRFSGSKSGTS
ASLAISGLQSEDEADYYCAVWDDSLNGWVFGGGTKLTVLGQPKAAPSVTLFPPSSEELQANKATLVCLI
SDFYPGAVTVAWKADSSPVKAGVETTTPSKQSNNKYAASSYLSLTPEQWKSHRSYSCQVTHEGSTVEK
TVAPTECS
SEQ ID NO: 817
13883_LC [hu anti-<huCDH19> 25G10.1 VL]::huKLC
EIVLTQSPGTLSLSPGERATLSCRASQSVSSSYLAWYQQKPGQAPRLLIFGASSRATGIPDRFSGSGSGTD
FTLTISRLEPEDFAVYHCQQYGNSPLTFGGGTKVEIKRTVAAPSVFIFPPSDEQLKSGTASVVCLLNNFYP
REAKVQWKVDNALQSGNSQESVTEQDSKDSTYSLSSTLTLSKADYEKHKVYACEVTHQGLSSPVTKSF
NRGEC
SEQ ID NO: 818
13885_LC [hu anti-<huCDH19> 19B5.1 VL]::huLLC-C2
QSALTQPPSTTGTPGQRVTISCSGSRSNIGSNFVNWYKQLPGTAPKVLIYTNNQRPSGVPDRFSGSKSGTS
ASLAISGLQSEDESDYYCATWDDSMNGWVFGGGTKLTVLGQPKAAPSVTLFPPSSEELQANKATLVCLI
SDFYPGAVTVAWKADSSPVKAGVETTTPSKQSNNKYAASSYLSLTPEQWKSHRSYSCQVTHEGSTVEK
TVAPTECS
SEQ ID NO: 819
14022_LC [hu anti-<huCDH19> 4A2 (1-236)(N30Q) VL]::huKLC
EIVLTQSPGTLSLSPGERATLSCRASRQISSSYLAWYQQKPGQAPRLLIYGPSSRATGIPDRFSGSGSGTDF
TLTISRLEPEDFTVYYCQQYGSSFTFGPGTKVDIKRTVAAPSVFIFPPSDEQLKSCTASVVCLLNNFYPRE
AKVQWKVDNALQSGNSQESVTEQDSKDSTYSLSSTLTLSKADYEKHKVYACEVTHQGLSSPVTKSFNR
GEC
SEQ ID NO: 820
14024_LC [hu anti-<huCDH19> 4A2 (1-236)(N30Q,T102A,P141Q) VL]::huKLC
EIVLTQSPGTLSLSPGERATLSCRASRQISSSYLAWYQQKPGQAPRLLIYGPSSRATGIPDRFSGSGSGTDF
TLTISRLEPEDFAVYYCQQYGSSFTFGQGTKVDIKRTVAAPSVFIFPPSDEQLKSCTASVVCLLNNFYPRE
AKVQWKVDNALQSGNSQESVTEQDSKDSTYSLSSTLTLSKADYEKHKVYACEVTHQGLSSPVTKSFNR
GEC
SEQ ID NO: 821
14025_LC [hu anti-<huCDH19> 4A2 (1-236)(N30Q,T102A) VL]::huKLC
EIVLTQSPGTLSLSPGERATLSCRASRQISSSYLAWYQQKPGQAPRLLIYGPSSRATGIPDRFSGSGSGTDF
TLTISRLEPEDFAVYYCQQYGSSFTFGPGTKVDIKRTVAAPSVFIFPPSDEQLKSCTASVVCLLNNFYPRE
AKVQWKVDNALQSGNSQESVTEQDSKDSTYSLSSTLTLSKADYEKHKVYACEVTHQGLSSPVTKSFNR
GEC
SEQ ID NO: 822
14026_LC [hu anti-<huCDH19> 4A2 (1-236)(N30Q,T102A) VL]::huKLC
EIVLTQSPGTLSLSPGERATLSCRASRQISSSYLAWYQQKPGQAPRLLIYGPSSRATGIPDRFSGSGSGTDF
TLTISRLEPEDFAVYYCQQYGSSFTFGQGTKVDIKRTVAAPSVFIFPPSDEQLKSGTASVVCLLNNFYPRE
AKVQWKVDNALQSGNSQESVTEQDSKDSTYSLSSTLTLSKADYEKHKVYACEVTHQGLSSPVTKSFNR
GEC
SEQ ID NO: 823
14027_LC [hu anti-<huCDH19> 4A2 (1-236)(N30Q,T102A,P141Q) VL]::huKLC
EIVLTQSPGTLSLSPGERATLSCRASRQISSSYLAWYQQKPGQAPRLLIYGPSSRATGIPDRFSGSGSGTDF
TLTISRLEPEDFAVYYCQQYGSSFTFGQGTKVDIKRTVAAPSVFIFPPSDEQLKSGTASVVCLLNNFYPRE
AKVQWKVDNALQSGNSQESVTEQDSKDSTYSLSSTLTLSKADYEKHKVYACEVTHQGLSSPVTKSFNR
GEC
SEQ ID NO: 824
14028_LC [hu anti-<huCDH19> 4A2 (1-236)(N30Q,T102A,P141Q) VL]::huKLC
EIVLTQSPGTLSLSPGERATLSCRASRQISSSYLAWYQQKPGQAPRLLIYGPSSRATGIPDRFSGSGSGTDF
TLTISRLEPEDFAVYYCQQYGSSFTFGQGTKVDIKRTVAAPSVFIFPPSDEQLKSGTASVVCLLNNFYPRE
AKVQWKVDNALQSGNSQESVTEQDSKDSTYSLSSTLTLSKADYEKHKVYACEVTHQGLSSPVTKSFNR
GEC
SEQ ID NO: 825
14029_LC [hu anti-<huCDH19> 4A2 (1-236)(R29Q,N30S) VL]::huKLC
EIVLTQSPGTLSLSPGERATLSCRASQSISSSYLAWYQQKPGQAPRLLIYGPSSRATGIPDRFSGSGSGTDF
TLTISRLEPEDFTVYYCQQYGSSFTFGPGTKVDIKRTVAAPSVFIFPPSDEQLKSGTASVVCLLNNFYPRE
AKVQWKVDNALQSGNSQESVTEQDSKDSTYSLSSTLTLSKADYEKHKVYACEVTHQGLSSPVTKSFNR
GEC
SEQ ID NO: 826
14030_LC [hu anti-<huCDH19> 4F3 VL]::huKLC
EIVLTQSPGTLSLSPGERATLSCRASQSVSSSYLAWYQQKPGQAPRLLIYGASSRATGIPDRFSGSGSGTD
FTLTISRLEPEDFAVYYCQQYGSSWTFGQGTKVEIKRTVAAPSVFIFPPSDEQLKSGTASVVCLLNNFYP
REAKVQWKVDNALQSGNSQESVTEQDSKDSTYSLSSTLTLSKADYEKHKVYACEVTHQGLSSPVTKSF
NRGEC
SEQ ID NO: 827
14031_LC [hu anti-<huCDH19> 4F3 VL]::huKLC
EIVLTQSPGTLSLSPGERATLSCRASQSVSSSYLAWYQQKPGQAPRLLIYGASSRATGIPDRFSGSGSGTD
FTLTISRLEPEDFAVYYCQQYGSSWTFGQGTKVEIKRTVAAPSVFIFPPSDEQLKSCTASVVCLLNNFYP
REAKVQWKVDNALQSGNSQESVTEQDSKDSTYSLSSTLTLSKADYEKHKVYACEVTHQGLSSPVTKSF
NRGEC
SEQ ID NO: 828
14032_LC [hu anti-<huCDH19> 4F3 VL]::huKLC
EIVLTQSPGTLSLSPGERATLSCRASQSVSSSYLAWYQQKPGQAPRLLIYGASSRATGIPDRFSGSGSGTD
FTLTISRLEPEDFAVYYCQQYGSSWTFGQGTKVEIKRTVAAPSVFIFPPSDEQLKSCTASVVCLLNNFYP
REAKVQWKVDNALQSGNSQESVTEQDSKDSTYSLSSTLTLSKADYEKHKVYACEVTHQGLSSPVTKSF
NRGEC
SEQ ID NO: 829
14033_LC [hu anti-<huCDH19> 4F3 VL]::huKLC
EIVLTQSPGTLSLSPGERATLSCRASQSVSSSYLAWYQQKPGQAPRLLIYGASSRATGIPDRFSGSGSGTD
FTLTISRLEPEDFAVYYCQQYGSSWTFGQGTKVEIKRTVAAPSVFIFPPSDEQLKSCTASVVCLLNNFYP
REAKVQWKVDNALQSGNSQESVTEQDSKDSTYSLSSTLTLSKADYEKHKVYACEVTHQGLSSPVTKSF
NRGEC
SEQ ID NO: 830
14034_LC [hu anti-<huCDH19> 4F3 VL]::huKLC
EIVLTQSPGTLSLSPGERATLSCRASQSVSSSYLAWYQQKPGQAPRLLIYGASSRATGIPDRFSGSGSGTD
FTLTISRLEPEDFAVYYCQQYGSSWTFGQGTKVEIKRTVAAPSVFIFPPSDEQLKSCTASVVCLLNNFYP
REAKVQWKVDNALQSGNSQESVTEQDSKDSTYSLSSTLTLSKADYEKHKVYACEVTHQGLSSPVTKSF
NRGEC
SEQ ID NO: 831
14039_LC [hu anti-<huCDH19> 2G6 (1-234)(C42S, D110E) VL]::huLLC-C1
SYELTQPPSVSVSPGQTASITCSGDRLGEKYTSWYQQRPGQSPLLVIYQDTKRPSGIPERFSGSNSGNTAT
LTISGTQAMDEADYYCQAWESSTVVFGGGTKLTVLGQPKANPTVTLFPPSSEELQANKATLVCLISDFY
PGAVTVAWKADGSPVKAGVETTKPSKQSNNKYAASSYLSLTPEQWKSHRSYSCQVTHEGSTVEKTVA
PTECS
SEQ ID NO: 832
14040_LC [hu anti-<huCDH19> 16C1.1 (1-235)(H105Y) VL]::huKLC
EIVLTQSPGTLSLSPGERATLSCRASQSVSSSYLAWYQQKPGQAPRLLIFGASSRATGIPDRFSGSGSGTD
FTLTISGLEPEDFAVYYCQQYGNSPLTFGGGTKVEIKRTVAAPSVFIFPPSDEQLKSGTASVVCLLNNFYP
REAKVQWKVDNALQSGNSQESVTEQDSKDSTYSLSSTLTLSKADYEKHKVYACEVTHQGLSSPVTKSF
NRGEC
SEQ ID NO: 833
14041_LC [hu anti-<huCDH19> 16C1.1 (1-235)(H105Y) VL]::huKLC
EIVLTQSPGTLSLSPGERATLSCRASQSVSSSYLAWYQQKPGQAPRLLIFGASSRATGIPDRFSGSGSGTD
FTLTISGLEPEDFAVYYCQQYGNSPLTFGGGTKVEIKRTVAAPSVFIFPPSDEQLKSGTASVVCLLNNFYP
REAKVQWKVDNALQSGNSQESVTEQDSKDSTYSLSSTLTLSKADYEKHKVYACEVTHQGLSSPVTKSF
NRGEC
SEQ ID NO: 834
14042_LC [hu anti-<huCDH19> 16C1.1 (1-235)(H105Y) VL]::huKLC
EIVLTQSPGTLSLSPGERATLSCRASQSVSSSYLAWYQQKPGQAPRLLIFGASSRATGIPDRFSGSGSGTD
FTLTISGLEPEDFAVYYCQQYGNSPLTFGGGTKVEIKRTVAAPSVFIFPPSDEQLKSGTASVVCLLNNFYP
REAKVQWKVDNALQSGNSQESVTEQDSKDSTYSLSSTLTLSKADYEKHKVYACEVTHQGLSSPVTKSF
NRGEC
SEQ ID NO: 835
14043_LC [hu anti-<huCDH19> 16C1.1 (1-235)(H105Y) VL]::huKLC
EIVLTQSPGTLSLSPGERATLSCRASQSVSSSYLAWYQQKPGQAPRLLIFGASSRATGIPDRFSGSGSGTD
FTLTISGLEPEDFAVYYCQQYGNSPLTFGGGTKVEIKRTVAAPSVFIFPPSDEQLKSGTASVVCLLNNFYP
REAKVQWKVDNALQSGNSQESVTEQDSKDSTYSLSSTLTLSKADYEKHKVYACEVTHQGLSSPVTKSF
NRGEC
SEQ ID NO: 836
14044_LC [hu anti-<huCDH19> 16C1.1 (1-235)(G95R, H105Y, G141Q) VL]::huKLC
EIVLTQSPGTLSLSPGERATLSCRASQSVSSSYLAWYQQKPGQAPRLLIFGASSRATGIPDRFSGSGSGTD
FTLTISRLEPEDFAVYYCQQYGNSPLTFGQGTKVEIKRTVAAPSVFIFPPSDEQLKSGTASVVCLLNNFYP
REAKVQWKVDNALQSGNSQESVTEQDSKDSTYSLSSTLTLSKADYEKHKVYACEVTHQGLSSPVTKSF
NRGEC
SEQ ID NO: 837
14045_LC [hu anti-<huCDH19> 17H8.2 (1-235)(G149R) VL]::huKLC
DIVLTQSPGTLSLSPGERATLSCRASQSVAGSYLAWYQQKPGQAPRLLISGASSRATGIPDRFSGSGSGT
DFTLTISRLEPEDFAVYYCQQYGKSPITFGQGTRLEMKRTVAAPSVFIFPPSDEQLKSGTASVVCLLNNF
YPREAKVQWKVDNALQSGNSQESVTEQDSKDSTYSLSSTLTLSKADYEKHKVYACEVTHQGLSSPVTK
SFNRGEC
SEQ ID NO: 838
14046_LC [hu anti-<huCDH19> 17H8.2 (1-235)(G149R) VL]::huKLC
DIVLTQSPGTLSLSPGERATLSCRASQSVAGSYLAWYQQKPGQAPRLLISGASSRATGIPDRFSGSGSGT
DFTLTISRLEPEDFAVYYCQQYGKSPITFGQGTRLEMKRTVAAPSVFIFPPSDEQLKSGTASVVCLLNNF
YPREAKVQWKVDNALQSGNSQESVTEQDSKDSTYSLSSTLTLSKADYEKHKVYACEVTHQGLSSPVTK
SFNRGEC
SEQ ID NO: 839
14047_LC [hu anti-<huCDH19> 17H8.2 (1-235)(G149R) VL]::huKLC
DIVLTQSPGTLSLSPGERATLSCRASQSVAGSYLAWYQQKPGQAPRLLISGASSRATGIPDRFSGSGSGT
DFTLTISRLEPEDFAVYYCQQYGKSPITFGQGTRLEMKRTVAAPSVFIFPPSDEQLKSGTASVVCLLNNF
YPREAKVQWKVDNALQSGNSQESVTEQDSKDSTYSLSSTLTLSKADYEKHKVYACEVTHQGLSSPVTK
SFNRGEC
SEQ ID NO: 840
14048_LC [hu anti-<huCDH19> 17H8.2 (1-235)(S57Y, G149R) VL]::huKLC
DIVLTQSPGTLSLSPGERATLSCRASQSVAGSYLAWYQQKPGQAPRLLIYGASSRATGIPDRFSGSGSGT
DFTLTISRLEPEDFAVYYCQQYGKSPITFGQGTRLEMKRTVAAPSVFIFPPSDEQLKSGTASVVCLLNNF
YPREAKVQWKVDNALQSGNSQESVTEQDSKDSTYSLSSTLTLSKADYEKHKVYACEVTHQGLSSPVTK
SFNRGEC
SEQ ID NO: 841
14049_LC [hu anti-<huCDH19> 4F7 (1-239)(1157Y) VL]::huLLC-C2
QSVLTQPPSVSGAPGQRVTISCTGSSSNIGTGYDVHWYQQLPGTAPKLLIYGNSNRPSGVPDRFSGSKSG
TSASLAITGLQAEDEADYYCQSYDSSLSGWVFGGGTRLTVLGQPKANPTVTLFPPSSEELQANKATLVC
LISDFYPGAVTVAWKADGSPVKAGVETTKPSKQSNNKYAASSYLSLTPEQWKSHRSYSCQVTHEGSTV
EKTVAPTECS
SEQ ID NO: 842
14050_LC [hu anti-<huCDH19> 4F7 (1-239)(H57Y, D110E) VL]::huLLC-C2
QSVLTQPPSVSGAPGQRVTISCTGSSSNIGTGYDVHWYQQLPGTAPKLLIYGNSNRPSGVPDRFSGSKSG
TSASLAITGLQAEDEADYYCQSYESSLSGWVFGGGTRLTVLGQPKANPTVTLFPPSSEELQANKATLVC
LISDFYPGAVTVAWKADGSPVKAGVETTKPSKQSNNKYAASSYLSLTPEQWKSHRSYSCQVTHEGSTV
EKTVAPTECS
SEQ ID NO: 843
14051_LC [hu anti-<huCDH19> 4F7 (1-239)(D110E) VL]::huLLC-C2
QSVLTQPPSVSGAPGQRVTISCTGSSSNIGTGYDVHWYQQLPGTAPKLLIHGNSNRPSGVPDRFSGSKSG
TSASLAITGLQAEDEADYYCQSYESSLSGWVFGGGTRLTVLGQPKANPTVTLFPPSSEELQANKATLVC
LISDFYPGAVTVAWKADGSPVKAGVETTKPSKQSNNKYAASSYLSLTPEQWKSHRSYSCQVTHEGSTV
EKTVAPTECS
SEQ ID NO: 844
14052_LC [hu anti-<huCDH19> 4B10 (1-236)(H45Q, A90T) VL]::huKLC
EIVLTQSPGTLSLSPGERATLSCRASQSVSNTYLAWYQQRPGQAPRLLIYGASSRATGIPDRFSGSGSGTD
FTLTISSLEPEDFAVYYCQQYSNSWTFGQGTKVEIKRTVAAPSVFIFPPSDEQLKSGTASVVCLLNNFYPR
EAKVQWKVDNALQSGNSQESVTEQDSKDSTYSLSSTLTLSKADYEKHKVYACEVTHQGLSSPVTKSFN
RGEC
SEQ ID NO: 845
14053_LC [hu anti-<huCDH19> 4B10 (1-236)(H45Q, A90T) VL]::huKLC
EIVLTQSPGTLSLSPGERATLSCRASQSVSNTYLAWYQQRPGQAPRLLIYGASSRATGIPDRFSGSGSGTD
FTLTISSLEPEDFAVYYCQQYSNSWTFGQGTKVEIKRTVAAPSVFIFPPSDEQLKSGTASVVCLLNNFYPR
EAKVQWKVDNALQSGNSQESVTEQDSKDSTYSLSSTLTLSKADYEKHKVYACEVTHQGLSSPVTKSFN
RGEC
SEQ ID NO: 846
14054_LC [hu anti-<huCDH19> 4B10 (1-236)(H45Q, A90T) VL]::huKLC
EIVLTQSPGTLSLSPGERATLSCRASQSVSNTYLAWYQQRPGQAPRLLIYGASSRATGIPDRFSGSGSGTD
FTLTISSLEPEDFAVYYCQQYSNSWTFGQGTKVEIKRTVAAPSVFIFPPSDEQLKSGTASVVCLLNNFYPR
EAKVQWKVDNALQSGNSQESVTEQDSKDSTYSLSSTLTLSKADYEKHKVYACEVTHQGLSSPVTKSFN
RGEC
SEQ ID NO: 847
14055_LC [hu anti-<huCDH19> 4B10 (1-236)(H45Q, A90T) VL]::huKLC
EIVLTQSPGTLSLSPGERATLSCRASQSVSNTYLAWYQQRPGQAPRLLIYGASSRATGIPDRFSGSGSGTD
FTLTISSLEPEDFAVYYCQQYSNSWTFGQGTKVEIKRTVAAPSVFIFPPSDEQLKSGTASVVCLLNNFYPR
EAKVQWKVDNALQSGNSQESVTEQDSKDSTYSLSSTLTLSKADYEKHKVYACEVTHQGLSSPVTKSFN
RGEC
SEQ ID NO: 848
14056_LC [hu anti-<huCDH19> 4A9 (1-239)(F47L) VL]::huLLC-C1
QSVLTQPPSVSGAPGQRVTISCTGSSSNIGTGYAVHWYQQLPGTAPKLLIYGNNNRPSGVPDRFSGSKSG
TSASLAITGLQAEDEADYYCQSYDSRLSGWVFGGGTKLTVLGQPKANPTVTLFPPSSEELQANKATLVC
LISDFYPGAVTVAWKADGSPVKAGVETTKPSKQSNNKYAASSYLSLTPEQWKSHRSYSCQVTHEGSTV
EKTVAPTECS
SEQ ID NO: 849
14057_LC [hu anti-<huCDH19> 4A9 (1-239)(F47L) VL]::huLLC-C1
QSVLTQPPSVSGAPGQRVTISCTGSSSNIGTGYAVHWYQQLPGTAPKLLIYGNNNRPSGVPDRFSGSKSG
TSASLAITGLQAEDEADYYCQSYDSRLSGWVFGGGTKLTVLGQPKANPTVTLFPPSSEELQANKATLVC
LISDFYPGAVTVAWKADGSPVKAGVETTKPSKQSNNKYAASSYLSLTPEQWKSHRSYSCQVTHEGSTV
EKTVAPTECS
SEQ ID NO: 850
14058_LC [hu anti-<huCDH19> 4A9 (1-239)(F47L, D110E) VL]::huLLC-C1
QSVLTQPPSVSGAPGQRVTISCTGSSSNIGTGYAVHWYQQLPGTAPKLLIYGNNNRPSGVPDRFSGSKSG
TSASLAITGLQAEDEADYYCQSYESRLSGWVFGGGTKLTVLGQPKANPTVTLFPPSSEELQANKATLVC
LISDFYPGAVTVAWKADGSPVKAGVETTKPSKQSNNKYAASSYLSLTPEQWKSHRSYSCQVTHEGSTV
EKTVAPTECS
SEQ ID NO: 851
14059_LC [hu anti-<huCDH19> 4A9 (1-239)(F47L, D110E) VL]::huLLC-C1
QSVLTQPPSVSGAPGQRVTISCTGSSSNIGTGYAVHWYQQLPGTAPKLLIYGNNNRPSGVPDRFSGSKSG
TSASLAITGLQAEDEADYYCQSYESRLSGWVFGGGTKLTVLGQPKANPTVTLFPPSSEELQANKATLVC
LISDFYPGAVTVAWKADGSPVKAGVETTKPSKQSNNKYAASSYLSLTPEQWKSHRSYSCQVTHEGSTV
EKTVAPTECS
SEQ ID NO: 852
14060_LC [hu anti-<huCDH19> 20D3.1 (1-235)(S102A) VL]::huLLC-C2
QSALTQPPSATGTPGQRVTISCSGSSSNIGSNFVNWYKQLPGTAPKVLIYTNNQRPSGVPDRFSGSKSGTS
ASLAISGLQSEDEADYYCATWDDSLNGWVFGGGTKLTVLGQPKAAPSVTLFPPSSEELQANKATLVCLI
SDFYPGAVTVAWKADSSPVKAGVETTTPSKQSNNKYAASSYLSLTPEQWKSHRSYSCQVTHEGSTVEK
TVAPTECS
SEQ ID NO: 853
14061_LC [hu anti-<huCDH19> 20D3.1 (1-235)(K45Q, S102A) VL]::huLLC-C2
QSALTQPPSATGTPGQRVTISCSGSSSNIGSNFVNWYQQLPGTAPKVLIYTNNQRPSGVPDRFSGSKSGTS
ASLAISGLQSEDEADYYCATWDDSLNGWVFGGGTKLTVLGQPKAAPSVTLFPPSSEELQANKATLVCLI
SDFYPGAVTVAWKADSSPVKAGVETTTPSKQSNNKYAASSYLSLTPEQWKSHRSYSCQVTHEGSTVEK
TVAPTECS
SEQ ID NO: 854
14062_LC [hu anti-<huCDH19> 20D3.1 (1-235)(K45Q, S102A) VL]::huLLC-C2
QSALTQPPSATGTPGQRVTISCSGSSSNIGSNFVNWYQQLPGTAPKVLIYTNNQRPSGVPDRFSGSKSGTS
ASLAISGLQSEDEADYYCATWDDSLNGWVFGGGTKLTVLGQPKAAPSVTLFPPSSEELQANKATLVCLI
SDFYPGAVTVAWKADSSPVKAGVETTTPSKQSNNKYAASSYLSLTPEQWKSHRSYSCQVTHEGSTVEK
TVAPTECS
SEQ ID NO: 855
14063_LC [hu anti-<huCDH19> 20D3.1 (1-235) (K45Q, S102A, D111E, N135Q) VL]::huLLC-C2
QSALTQPPSATGTPGQRVTISCSGSSSNIGSNFVNWYQQLPGTAPKVLIYTNNQRPSGVPDRFSGSKSGTS
ASLAISGLQSEDEADYYCATWDESLQGWVFGGGTKLTVLGQPKAAPSVTLFPPSSEELQANKATLVCLI
SDFYPGAVTVAWKADSSPVKAGVETTTPSKQSNNKYAASSYLSLTPEQWKSHRSYSCQVTHEGSTVEK
TVAPTECS
SEQ ID NO: 856
14064_LC [hu anti-<huCDH19> 20D3.1 (1-235)(W109Y) VL]::huLLC-C2
QSALTQPPSATGTPGQRVTISCSGSSSNIGSNFVNWYKQLPGTAPKVLIYTNNQRPSGVPDRFSGSKSGTS
ASLAISGLQSEDESDYYCATYDDSLNGWVFGGGTKLTVLGQPKAAPSVTLFPPSSEELQANKATLVCLI
SDFYPGAVTVAWKADSSPVKAGVETTTPSKQSNNKYAASSYLSLTPEQWKSHRSYSCQVTHEGSTVEK
TVAPTECS
SEQ ID NO: 857
14065_LC [hu anti-<huCDH19> 22G10.1 VL]::huKLC
EIVMTQSPVTLSLSLGERATLSCRASQSISSNLAWFQQKPGQAPRLLIYGAFTRATGIPARVSGSGSGTEF
TLTISSLQSEDFAVYYCQQYNYWPLTFGGGTKVEIKRTVAAPSVFIFPPSDEQLKSGTASVVCLLNNFYP
REAKVQWKVDNALQSGNSQESVTEQDSKDSTYSLSSTLTLSKADYEKHKVYACEVTHQGLSSPVTKSF
NRGEC
SEQ ID NO: 858
14066_LC [hu anti-<huCDH19> 22G10.1 VL]::huKLC
EIVMTQSPVTLSLSLGERATLSCRASQSISSNLAWFQQKPGQAPRLLIYGAFTRATGIPARVSGSGSGTEF
TLTISSLQSEDFAVYYCQQYNYWPLTFGGGTKVEIKRTVAAPSVFIFPPSDEQLKSGTASVVCLLNNFYP
REAKVQWKVDNALQSGNSQESVTEQDSKDSTYSLSSTLTLSKADYEKHKVYACEVTHQGLSSPVTKSF
NRGEC
SEQ ID NO: 859
14067_LC [hu anti-<huCDH19> 22G10.1 (1-234)(Q97E, S98P) VL]::huKLC
EIVMTQSPVTLSLSLGERATLSCRASQSISSNLAWFQQKPGQAPRLLIYGAFTRATGIPARVSGSGSGTEF
TLTISSLEPEDFAVYYCQQYNYWPLTFGGGTKVEIKRTVAAPSVFIFPPSDEQLKSGTASVVCLLNNFYP
REAKVQWKVDNALQSGNSQESVTEQDSKDSTYSLSSTLTLSKADYEKHKVYACEVTHQGLSSPVTKSF
NRGEC
SEQ ID NO: 860
14068_LC [hu anti-<huCDH19> 22G10.1 (1-234)(V78F, Q97E, S98P) VL]::huKLC
EIVMTQSPVTLSLSLGERATLSCRASQSISSNLAWFQQKPGQAPRLLIYGAFTRATGIPARFSGSGSGTEF
TLTISSLEPEDFAVYYCQQYNYWPLTFGGGTKVEIKRTVAAPSVFIFPPSDEQLKSGTASVVCLLNNFYP
REAKVQWKVDNALQSGNSQESVTEQDSKDSTYSLSSTLTLSKADYEKHKVYACEVTHQGLSSPVTKSF
NRGEC
SEQ ID NO: 861
14069_LC [hu anti-<huCDH19> 22G10.1 (1-234)(V78F, Q97E, S98P) VL]::huKLC
EIVMTQSPVTLSLSLGERATLSCRASQSISSNLAWFQQKPGQAPRLLIYGAFTRATGIPARFSGSGSGTEF
TLTISSLEPEDFAVYYCQQYNYWPLTFGGGTKVEIKRTVAAPSVFIFPPSDEQLKSGTASVVCLLNNFYP
REAKVQWKVDNALQSGNSQESVTEQDSKDSTYSLSSTLTLSKADYEKHKVYACEVTHQGLSSPVTKSF
NRGEC
SEQ ID NO: 862
14070_LC [hu anti-<huCDH19> 22G10.1V L]::huKLC
EIVMTQSPVTLSLSLGERATLSCRASQSISSNLAWFQQKPGQAPRLLIYGAFTRATGIPARVSGSGSGTEF
TLTISSLQSEDFAVYYCQQYNYWPLTFGGGTKVEIKRTVAAPSVFIFPPSDEQLKSGTASVVCLLNNFYP
REAKVQWKVDNALQSGNSQESVTEQDSKDSTYSLSSTLTLSKADYEKHKVYACEVTHQGLSSPVTKSF
NRGEC
SEQ ID NO: 863
14071_LC [hu anti-<huCDH19> 16A4.1 (1-235)(G141Q) VL]::huKLC
EIVLTQSPGTLSLSPGERATLSCRASQSVSSSYLAWYQQKPGQAPRLLIYGTSSRATGIPDRFSGSGSGTD
FTLTISRLEPEDFAVYYCQQYGSSPFTFGQGTKVEIKRTVAAPSVFIFPPSDEQLKSCTASVVCLLNNFYP
REAKVQWKVDNALQSGNSQESVTEQDSKDSTYSLSSTLTLSKADYEKHKVYACEVTHQGLSSPVTKSF
NRGEC
SEQ ID NO: 864
14072_LC [hu anti-<huCDH19> 19B5.1 (1-235)(K45Q, S102A) VL]::huLLC-C2
QSALTQPPSTTGTPGQRVTISCSGSRSNIGSNFVNWYQQLPGTAPKVLIYTNNQRPSGVPDRFSGSKSGTS
ASLAISGLQSEDEADYYCATWDDSMNGWVFGGGTKLTVLGQPKAAPSVTLFPPSSEELQANKATLVCL
ISDFYPGAVTVAWKADSSPVKAGVETTTPSKQSNNKYAASSYLSLTPEQWKSHRSYSCQVTHEGSTVE
KTVAPTECS
SEQ ID NO: 865
14073_LC [hu anti-<huCDH19> 19B5.1 (1-235)(K45Q, S102A) VL]::huLLC-C2
QSALTQPPSTTGTPGQRVTISCSGSRSNIGSNFVNWYQQLPGTAPKVLIYTNNQRPSGVPDRFSGSKSGTS
ASLAISGLQSEDEADYYCATWDDSMNGWVFGGGTKLTVLGQPKAAPSVTLFPPSSEELQANKATLVCL
ISDFYPGAVTVAWKADSSPVKAGVETTTPSKQSNNKYAASSYLSLTPEQWKSHRSYSCQVTHEGSTVE
KTVAPTECS
SEQ ID NO: 866
14074_LC [hu anti-<huCDH19> 19B5.1 (1-235)(T11V, K45Q, S102A) VL]::huLLC-C2
QSALTQPPSVTGTPGQRVTISCSGSRSNIGSNFVNWYQQLPGTAPKVLIYTNNQRPSGVPDRFSGSKSGT
SASLAISGLQSEDEADYYCATWDDSMNGWVFGGGTKLTVLGQPKAAPSVTLFPPSSEELQANKATLVC
LISDFYPGAVTVAWKADSSPVKAGVETTTPSKQSNNKYAASSYLSLTPEQWKSHRSYSCQVTHEGSTV
EKTVAPTECS
SEQ ID NO: 867
14075_LC [hu anti-<huCDH19> 19B5.1 (1-235) (T11V, K45Q, S102A, D111E, N135Q) VL]::huLLC-C2
QSALTQPPSVTGTPGQRVTISCSGSRSNIGSNFVNWYQQLPGTAPKVLIYTNNQRPSGVPDRFSGSKSGT
SASLAISGLQSEDEADYYCATWDESMQGWVFGGGTKLTVLGQPKAAPSVTLFPPSSEELQANKATLVC
LISDFYPGAVTVAWKADSSPVKAGVETTTPSKQSNNKYAASSYLSLTPEQWKSHRSYSCQVTHEGSTV
EKTVAPTECS
SEQ ID NO: 868
14076_LC [hu anti-<huCDH19> 19B5.1 (1-235)(T11V, K45Q, S102A, W109Y, D111E, N135Q) VL]::huLLC-
C2
QSALTQPPSVTGTPGQRVTISCSGSRSNIGSNFVNWYQQLPGTAPKVLIYTNNQRPSGVPDRFSGSKSGT
SASLAISGLQSEDEADYYCATYDESMQGWVFGGGTKLTVLGQPKAAPSVTLFPPSSEELQANKATLVC
LISDFYPGAVTVAWKADSSPVKAGVETTTPSKQSNNKYAASSYLSLTPEQWKSHRSYSCQVTHEGSTV
EKTVAPTECS
SEQ ID NO: 869
14077_LC [hu anti-<huCDH19> 23A10.3 (1-231)(C42S) VL]::huLLC-C2
SYELTQPPSVSVSPGQTASITCSGDRLGEKYVSWYQQKPGQSPILVIYQDNKWPSGIPERFSGSNSGNTA
TLTISGTQAMDEADYYCQAWDSSTVVFGGGTKLTVLGQPKAAPSVTLFPPSSEELQANKATLVCLISDF
YPGAVTVAWKADSSPVKAGVETTTPSKQSNNKYAASSYLSLTPEQWKSHRSYSCQVTHEGSTVEKTV
APTECS
SEQ ID NO: 870
14078_LC [hu anti-<huCDH19> 23A10.3 (1-231)(C42S) VL]::huLLC-C2
SYELTQPPSVSVSPGQTASITCSGDRLGEKYVSWYQQKPGQSPILVIYQDNKWPSGIPERFSGSNSGNTA
TLTISGTQAMDEADYYCQAWDSSTVVFGGGTKLTVLGQPKAAPSVTLFPPSSEELQANKATLVCLISDF
YPGAVTVAWKADSSPVKAGVETTTPSKQSNNKYAASSYLSLTPEQWKSHRSYSCQVTHEGSTVEKTV
APTECS
SEQ ID NO: 871
14079_LC [hu anti-<huCDH19> 23A10.3 (1-231)(C42S, D110E) VL]::huLLC-C2
SYELTQPPSVSVSPGQTASITCSGDRLGEKYVSWYQQKPGQSPILVIYQDNKWPSGIPERFSGSNSGNTA
TLTISGTQAMDEADYYCQAWESSTVVFGGGTKLTVLGQPKAAPSVTLFPPSSEELQANKATLVCLISDF
YPGAVTVAWKADSSPVKAGVETTTPSKQSNNKYAASSYLSLTPEQWKSHRSYSCQVTHEGSTVEKTV
APTECS
SEQ ID NO: 872
14080_LC [hu anti-<huCDH19> 23A10.3 (1-231)(C42Y) VL]::huLLC-C2
SYELTQPPSVSVSPGQTASITCSGDRLGEKYVYWYQQKPGQSPILVIYQDNKWPSGIPERFSGSNSGNTA
TLTISGTQAMDEADYYCQAWDSSTVVFGGGTKLTVLGQPKAAPSVTLFPPSSEELQANKATLVCLISDF
YPGAVTVAWKADSSPVKAGVETTTPSKQSNNKYAASSYLSLTPEQWKSHRSYSCQVTHEGSTVEKTV
APTECS
SEQ ID NO: 873
14081_LC [hu anti-<huCDH19> 25G10.1 (1-235)(H105Y) VL]::huKLC
EIVLTQSPGTLSLSPGERATLSCRASQSVSSSYLAWYQQKPGQAPRLLIFGASSRATGIPDRFSGSGSGTD
FTLTISRLEPEDFAVYYCQQYGNSPLTFGGGTKVEIKRTVAAPSVFIFPPSDEQLKSGTASVVCLLNNFYP
REAKVQWKVDNALQSGNSQESVTEQDSKDSTYSLSSTLTLSKADYEKHKVYACEVTHQGLSSPVTKSF
NRGEC
SEQ ID NO: 874
14082_LC [hu anti-<huCDH19> 25G10.1 (1-235)(H105Y) VL]::huKLC
EIVLTQSPGTLSLSPGERATLSCRASQSVSSSYLAWYQQKPGQAPRLLIFGASSRATGIPDRFSGSGSGTD
FTLTISRLEPEDFAVYYCQQYGNSPLTFGGGTKVEIKRTVAAPSVFIFPPSDEQLKSGTASVVCLLNNFYP
REAKVQWKVDNALQSGNSQESVTEQDSKDSTYSLSSTLTLSKADYEKHKVYACEVTHQGLSSPVTKSF
NRGEC
SEQ ID NO: 875
14083_LC [hu anti-<huCDH19> 26D1.1 (1-235)(S7P) VL]::huLLC-C2
HSVLTQPPSASGTPGQRVTISCSGSRSNIGSNFVNWYQQLPGTAPKLLIYTNNQRPSGVPDRFSGSKSGTS
ASLAISGLQSEDEADYYCAVWDDSLNGWVFGGGTKLTVLGQPKAAPSVTLFPPSSEELQANKATLVCLI
SDFYPGAVTVAWKADSSPVKAGVETTTPSKQSNNKYAASSYLSLTPEQWKSHRSYSCQVTHEGSTVEK
TVAPTECS
SEQ ID NO: 876
14084_LC [hu anti-<huCDH19> 26D1.1 (1-235)(H1Q,S7P) VL]::huLLC-C2
QSVLTQPPSASGTPGQRVTISCSGSRSNIGSNFVNWYQQLPGTAPKLLIYTNNQRPSGVPDRFSGSKSGTS
ASLAISGLQSEDEADYYCAVWDDSLNGWVFGGGTKLTVLGQPKAAPSVTLFPPSSEELQANKATLVCLI
SDFYPGAVTVAWKADSSPVKAGVETTTPSKQSNNKYAASSYLSLTPEQWKSHRSYSCQVTHEGSTVEK
TVAPTECS
SEQ ID NO: 877
14085_LC [hu anti-<huCDH19> 26D1.1 (1-235)(H1Q,S7P,W109Y) VL]::huLLC-C2
QSVLTQPPSASGTPGQRVTISCSGSRSNIGSNFVNWYQQLPGTAPKLLIYTNNQRPSGVPDRFSGSKSGTS
ASLAISGLQSEDEADYYCAVYDDSLNGWVFGGGTKLTVLGQPKAAPSVTLFPPSSEELQANKATLVCLI
SDFYPGAVTVAWKADSSPVKAGVETTTPSKQSNNKYAASSYLSLTPEQWKSHRSYSCQVTHEGSTVEK
TVAPTECS
SEQ ID NO: 878
14086_LC [hu anti-<huCDH19> 26D1.1 (1-235)(H1Q,S7P,W109Y,D111E,N135Q) VL]::huLLC-C2
QSVLTQPPSASGTPGQRVTISCSGSRSNIGSNFVNWYQQLPGTAPKLLIYTNNQRPSGVPDRFSGSKSGTS
ASLAISGLQSEDEADYYCAVYDESLQGWVFGGGTKLTVLGQPKAAPSVTLFPPSSEELQANKATLVCLI
SDFYPGAVTVAWKADSSPVKAGVETTTPSKQSNNKYAASSYLSLTPEQWKSHRSYSCQVTHEGSTVEK
TVAPTECS
SEQ ID NO: 879
14087_LC [hu anti-<huCDH19> 26D1.1 (1-235)(H1Q,S7P,W109Y,D111E,N135Q) VL]::huLLC-C2
QSVLTQPPSASGTPGQRVTISCSGSRSNIGSNFVNWYQQLPGTAPKLLIYTNNQRPSGVPDRFSGSKSGTS
ASLAISGLQSEDEADYYCAVYDESLQGWVFGGGTKLTVLGQPKAAPSVTLFPPSSEELQANKATLVCLI
SDFYPGAVTVAWKADSSPVKAGVETTTPSKQSNNKYAASSYLSLTPEQWKSHRSYSCQVTHEGSTVEK
TVAPTECS
SEQ ID NO: 880
14088_LC [hu anti-<huCDH19> 26D1.1 (1-235)(H1Q,S7P) VL]::huLLC-C2
QSVLTQPPSASGTPGQRVTISCSGSRSNIGSNFVNWYQQLPGTAPKLLIYTNNQRPSGVPDRFSGSKSGTS
ASLAISGLQSEDEADYYCAVWDDSLNGWVFGGGTKLTVLGQPKAAPSVTLFPPSSEELQANKATLVCLI
SDFYPGAVTVAWKADSSPVKAGVETTTPSKQSNNKYAASSYLSLTPEQWKSHRSYSCQVTHEGSTVEK
TVAPTECS
SEQ ID NO: 881
14089_LC [hu anti-<huCDH19> 26F12.1 (1-235)(S7P) VL]::huLLC-C2
QSVLTQPPSASGTPGQKVTISCSGSRSNIGSNFVNWYQQLPGTAPKLLIYTNYQRPSGVPDRFSGSKSGTS
ASLAISGLQSEDEADYYCAVWDDSLNGWVFGGGTKLTVLGQPKAAPSVTLFPPSSEELQANKATLVCLI
SDFYPGAVTVAWKADSSPVKAGVETTTPSKQSNNKYAASSYLSLTPEQWKSHRSYSCQVTHEGSTVEK
TVAPTECS
SEQ ID NO: 882
14090_LC [hu anti-<huCDH19> 26F12.1 (1-235)(S7P,D111E) VL]::huLLC-C2
QSVLTQPPSASGTPGQKVTISCSGSRSNIGSNFVNWYQQLPGTAPKLLIYTNYQRPSGVPDRFSGSKSGTS
ASLAISGLQSEDEADYYCAVWDESLNGWVFGGGTKLTVLGQPKAAPSVTLFPPSSEELQANKATLVCLI
SDFYPGAVTVAWKADSSPVKAGVETTTPSKQSNNKYAASSYLSLTPEQWKSHRSYSCQVTHEGSTVEK
TVAPTECS
SEQ ID NO: 883
14091_LC [hu anti-<huCDH19> 26F12.1 (1-235)(S7P,D111E) VL]::huLLC-C2
QSVLTQPPSASGTPGQKVTISCSGSRSNIGSNFVNWYQQLPGTAPKLLIYTNYQRPSGVPDRFSGSKSGTS
ASLAISGLQSEDEADYYCAVWDESLNGWVFGGGTKLTVLGQPKAAPSVTLFPPSSEELQANKATLVCLI
SDFYPGAVTVAWKADSSPVKAGVETTTPSKQSNNKYAASSYLSLTPEQWKSHRSYSCQVTHEGSTVEK
TVAPTECS
SEQ ID NO: 884
14092_LC [hu anti-<huCDH19> 26F12.1 (1-235)(S7P,W109Y,D111E,N135Q) VL]::huLLC-C2
QSVLTQPPSASGTPGQKVTISCSGSRSNIGSNFVNWYQQLPGTAPKLLIYTNYQRPSGVPDRFSGSKSGTS
ASLAISGLQSEDEADYYCAVYDESLQGWVFGGGTKLTVLGQPKAAPSVTLFPPSSEELQANKATLVCLI
SDFYPGAVTVAWKADSSPVKAGVETTTPSKQSNNKYAASSYLSLTPEQWKSHRSYSCQVTHEGSTVEK
TVAPTECS
SEQ ID NO: 885
14093_LC [hu anti-<huCDH19> 25F8.1 (1-235)(K45Q) VL]::huLLC-C2
QSALTQPPSATGTPGQRVTISCSGSSSNIGRNFVNWYQQLPGTAPKVLIYTNNQRPSGVPDRFSGSKSGT
SASLAISGLQSEDESDYYCAAWDDSLNGWVFGGGTKLTVLGQPKAAPSVTLFPPSSEELQANKATLVC
LISDFYPGAVTVAWKADSSPVKAGVETTTPSKQSNNKYAASSYLSLTPEQWKSHRSYSCQVTHEGSTV
EKTVAPTECS
SEQ ID NO: 886
14094_LC [hu anti-<huCDH19> 25F8.1 (1-235)(K45Q,S102A) VL]::huLLC-C2
QSALTQPPSATGTPGQRVTISCSGSSSNIGRNFVNWYQQLPGTAPKVLIYTNNQRPSGVPDRFSGSKSGT
SASLAISGLQSEDEADYYCAAWDDSLNGWVFGGGTKLTVLGQPKAAPSVTLFPPSSEELQANKATLVC
LISDFYPGAVTVAWKADSSPVKAGVETTTPSKQSNNKYAASSYLSLTPEQWKSHRSYSCQVTHEGSTV
EKTVAPTECS
SEQ ID NO: 887
14095_LC [hu anti-<huCDH19> 25F8.1 (1-235)(K45Q,S102A) VL]::huLLC-C2
QSALTQPPSATGTPGQRVTISCSGSSSNIGRNFVNWYQQLPGTAPKVLIYTNNQRPSGVPDRFSGSKSGT
SASLAISGLQSEDEADYYCAAWDDSLNGWVFGGGTKLTVLGQPKAAPSVTLFPPSSEELQANKATLVC
LISDFYPGAVTVAWKADSSPVKAGVETTTPSKQSNNKYAASSYLSLTPEQWKSHRSYSCQVTHEGSTV
EKTVAPTECS
SEQ ID NO: 888
14096_LC [hu anti-<huCDH19> 25F8.1 (1-235)(K45Q,S102A,D111E) VL]::huLLC-C2
QSALTQPPSATGTPGQRVTISCSGSSSNIGRNFVNWYQQLPGTAPKVLIYTNNQRPSGVPDRFSGSKSGT
SASLAISGLQSEDEADYYCAAWDESLNGWVFGGGTKLTVLGQPKAAPSVTLFPPSSEELQANKATLVC
LISDFYPGAVTVAWKADSSPVKAGVETTTPSKQSNNKYAASSYLSLTPEQWKSHRSYSCQVTHEGSTV
EKTVAPTECS
SEQ ID NO: 889
14097_LC [hu anti-<huCDH19> 25F8.1 (1-235)(K45Q,S102A,D111E,N135Q) VL]::huLLC-C2
QSALTQPPSATGTPGQRVTISCSGSSSNIGRNFVNWYQQLPGTAPKVLIYTNNQRPSGVPDRFSGSKSGT
SASLAISGLQSEDEADYYCAAWDESLQGWVFGGGTKLTVLGQPKAAPSVTLFPPSSEELQANKATLVC
LISDFYPGAVTVAWKADSSPVKAGVETTTPSKQSNNKYAASSYLSLTPEQWKSHRSYSCQVTHEGSTV
EKTVAPTECS
SEQ ID NO: 890
14098_LC [hu anti-<huCDH19> 22D1.1 (1-235)(K45Q,S102A) VL]::huLLC-C2
QSALTQPPSATGTPGQRVTISCSGSSSNIGSNFVNWYQQLPGTAPKVLIYTNNQRPSGVPDRFSGSKSGTS
ASLAISGLQSEDEADYYCATWDDSMNGWVFGGGTKLTVLGQPKAAPSVTLFPPSSEELQANKATLVCL
ISDFYPGAVTVAWKADSSPVKAGVETTTPSKQSNNKYAASSYLSLTPEQWKSHRSYSCQVTHEGSTVE
KTVAPTECS
SEQ ID NO: 891
14099_LC [hu anti-<huCDH19> 22D1.1 (1-235)(K45Q,S102A,D111E,N135Q) VL]::huLLC-C2
QSALTQPPSATGTPGQRVTISCSGSSSNIGSNFVNWYQQLPGTAPKVLIYTNNQRPSGVPDRFSGSKSGTS
ASLAISGLQSEDEADYYCATWDESMQGWVFGGGTKLTVLGQPKAAPSVTLFPPSSEELQANKATLVCL
ISDFYPGAVTVAWKADSSPVKAGVETTTPSKQSNNKYAASSYLSLTPEQWKSHRSYSCQVTHEGSTVE
KTVAPTECS
SEQ ID NO: 892
14100_LC [hu anti-<huCDH19> 22D1.1 (1-235)(K45Q,S102A,W109Y,D111E,N135Q) VL]::huLLC-C2
QSALTQPPSATGTPGQRVTISCSGSSSNIGSNFVNWYQQLPGTAPKVLIYTNNQRPSGVPDRFSGSKSGTS
ASLAISGLQSEDEADYYCATYDESMQGWVFGGGTKLTVLGQPKAAPSVTLFPPSSEELQANKATLVCLI
SDFYPGAVTVAWKADSSPVKAGVETTTPSKQSNNKYAASSYLSLTPEQWKSHRSYSCQVTHEGSTVEK
TVAPTECS
SEQ ID NO: 893
14101_LC [hu anti-<huCDH19> 22D1.1 (1-235)(K45Q,S102A,W109Y) VL]::huLLC-C2
QSALTQPPSATGTPGQRVTISCSGSSSNIGSNFVNWYQQLPGTAPKVLIYTNNQRPSGVPDRFSGSKSGTS
ASLAISGLQSEDEADYYCATYDDSMNGWVFGGGTKLTVLGQPKAAPSVTLFPPSSEELQANKATLVCLI
SDFYPGAVTVAWKADSSPVKAGVETTTPSKQSNNKYAASSYLSLTPEQWKSHRSYSCQVTHEGSTVEK
TVAPTECS
SEQ ID NO: 894
14102_LC [hu anti-<huCDH19> 22D1.1 (1-235)(K45Q,S102A) VL]::huLLC-C2
QSALTQPPSATGTPGQRVTISCSGSSSNIGSNFVNWYQQLPGTAPKVLIYTNNQRPSGVPDRFSGSKSGTS
ASLAISGLQSEDEADYYCATWDDSMNGWVFGGGTKLTVLGQPKAAPSVTLFPPSSEELQANKATLVCL
ISDFYPGAVTVAWKADSSPVKAGVETTTPSKQSNNKYAASSYLSLTPEQWKSHRSYSCQVTHEGSTVE
KTVAPTECS
SEQ ID NO: 895
13591_LC [hu anti-<huCDH19> 4F7 VL]::huLLC-C1
QSVLTQPPSVSGAPGQRVTISCTGSSSNIGTGYDVHWYQQLPGTAPKLLIHGNSNRPSGVPDRFSGSKSG
TSASLAITGLQAEDEADYYCQSYDSSLSGWVFGGGTRLTVLGQPKANPTVTLFPPSSEELQANKATLVC
LISDFYPGAVTVAWKADGSPVKAGVETTKPSKQSNNKYAASSYLSLTPEQWKSHRSYSCQVTHEGSTV
EKTVAPTECS
SEQ ID NO: 896
14301_LC [hu anti-<huCDH19> 2G6 (1-234)(D110E) VL]::huLLC-C1
SYELTQPPSVSVSPGQTASITCSGDRLGEKYTCWYQQRPGQSPLLVIYQDTKRPSGIPERFSGSNSGNTAT
LTISGTQAMDEADYYCQAWESSTVVFGGGTKLTVLGQPKANPTVTLFPPSSEELQANKATLVCLISDFY
PGAVTVAWKADGSPVKAGVETTKPSKQSNNKYAASSYLSLTPEQWKSHRSYSCQVTHEGSTVEKTVA
PTECS
SEQ ID NO: 897
14302_LC [hu anti-<huCDH19> 2G6 (1-234)(C42S,D110E) VL]::huLLC-C1
SYELTQPPSVSVSPGQTASITCSGDRLGEKYTSWYQQRPGQSPLLVIYQDTKRPSGIPERFSGSNSGNTAT
LTISGTQAMDEADYYCQAWESSTVVFGGGTKLTVLGQPKANPTVTLFPPSSEELQANKATLVCLISDFY
PGAVTVAWKADGSPVKAGVETTKPSKQSNNKYAASSYLSLTPEQWKSHRSYSCQVTHEGSTVEKTVA
PTECS
SEQ ID NO: 898
14303_LC [hu anti-<huCDH19> 2G6 (1-234)(C42S,D110E) VL]::huLLC-C1
SYELTQPPSVSVSPGQTASITCSGDRLGEKYTSWYQQRPGQSPLLVIYQDTKRPSGIPERFSGSNSGNTAT
LTISGTQAMDEADYYCQAWESSTVVFGGGTKLTVLGQPKANPTVTLFPPSSEELQANKATLVCLISDFY
PGAVTVAWKADGSPVKAGVETTKPSKQSNNKYAASSYLSLTPEQWKSHRSYSCQVTHEGSTVEKTVA
PTECS
SEQ ID NO: 899
14304_LC [hu anti-<huCDH19> 23A10.3 (1-231)(C42S) VL]::huLLC-C2
SYELTQPPSVSVSPGQTASITCSGDRLGEKYVSWYQQKPGQSPILVIYQDNKWPSGIPERFSGSNSGNTA
TLTISGTQAMDEADYYCQAWDSSTVVFGGGTKLTVLGQPKAAPSVTLFPPSSEELQANKATLVCLISDF
YPGAVTVAWKADSSPVKAGVETTTPSKQSNNKYAASSYLSLTPEQWKSHRSYSCQVTHEGSTVEKTV
APTECS
SEQ ID NO: 900

TABLE IVa
HEAVY CHAIN CDRs

| Ab | Type | CDR 1 | CDR 2 | CDR 3 |
|---|---|---|---|---|
| 14039 | AA | SYGMH | FIWYEGSNKYYAESVKD | RAGIIGTIGYYYGMDV |
| 14303 | | SEQ ID NO: 28 | SEQ ID NO: 901 | SEQ ID NO: 30 |
| 14027 | AA | SSGYYWS | YIYYTGSAYYNPSLKS | EGSSGWYFQY |
| | | SEQ ID NO: 46 | SEQ ID NO: 47 | SEQ ID NO: 902 |
| 14028 | AA | SSGYYWS | YIYYTGSAYYNPSLKS | EGSSGYYFQY |
| | | SEQ ID NO: 46 | SEQ ID NO: 47 | SEQ ID NO: 903 |
| 14059 | AA | GYYWS | YFSYSGSTNYNPSLKS | NYAFHFDF |
| | | SEQ ID NO: 52 | SEQ ID NO: 53 | SEQ ID NO: 904 |
| 14052 | AA | SYDMH | VISYEGTNEYYAESVKG | ERYFDYSFDY |
| | | SEQ ID NO: 58 | SEQ ID NO: 905 | SEQ ID NO: 906 |
| 14055 | AA | SYDMH | VISYEGTNEYYAESVKG | ERYFDWSFDY |
| | | SEQ ID NO: 58 | SEQ ID NO: 905 | SEQ ID NO: 60 |
| 14033 | AA | SYDMD | VIWYEGSNKYYAESVRG | ETGEGWYFDL |
| | | SEQ ID NO: 70 | SEQ ID NO: 907 | SEQ ID NO: 72 |
| 14034 | AA | SYDMD | VIWYEGSNKYYAESVRG | ETGEGYYFDL |
| | | SEQ ID NO: 70 | SEQ ID NO: 907 | SEQ ID NO: 908 |
| 14051 | AA | SYSWS | YIYYSGSTNYNPSLKS | NYAFHFDY |
| | | SEQ ID NO: 82 | SEQ ID NO: 83 | SEQ ID NO: 909 |
| 14046 | AA | SYYWS | YIYYIGSTNYNPSLKS | ESRYRSGWYDAFDI |
| 14048 | | SEQ ID NO: 94 | SEQ ID NO: 95 | SEQ ID NO: 910 |
| 14047 | AA | SYYWS | YIYYIGSTNYNPSLKS | ESRYRSGYYDAFDI |
| | | SEQ ID NO: 94 | SEQ ID NO: 95 | SEQ ID NO: 911 |
| 14042 | AA | GYYWS | YIYYIGSTNYNPSLKS | EGSSGWYRWFDP |
| | | SEQ ID NO: 100 | SEQ ID NO: 101 | SEQ ID NO: 912 |
| 14043 | AA | GYYWS | YIYYIGSTNYNPSLKS | DGSSGYYRYFDP |
| | | SEQ ID NO: 100 | SEQ ID NO: 101 | SEQ ID NO: 913 |
| 14069 | AA | SYAMN | TISGGGANTYYAESVKG | GGMGGYYYGMDV |
| | | SEQ ID NO: 118 | SEQ ID NO: 914 | SEQ ID NO: 120 |
| 14062 | AA | SYFIH | IINPISVSTSYAQKFQG | GGIQLYLHFDY |
| 14063 | | SEQ ID NO: 124 | SEQ ID NO: 125 | SEQ ID NO: 915 |
| 14064 | | | | |
| 14100 | AA | SYFIH | IINPISVSTSYAQKFQG | GGIQLYLHLDY |
| 14101 | | SEQ ID NO: 130 | SEQ ID NO: 131 | SEQ ID NO: 916 |
| 14097 | AA | SYYIH | IINPSGGSTRYAQKFQG | GGIQLYLHFDY |
| | | SEQ ID NO: 136 | SEQ ID NO: 137 | SEQ ID NO: 917 |
| 14091 | AA | NYYMS | IINPSGGDSTYAQKFQG | GGIQLYLHFDY |
| 14092 | | SEQ ID NO: 142 | SEQ ID NO: 143 | SEQ ID NO: 918 |
| 14087 | AA | SYYMS | IIHPSGGDTTYAQKFQG | GGIKLYLHFDY |
| | | SEQ ID NO: 148 | SEQ ID NO: 149 | SEQ ID NO: 919 |
| 14082 | AA | GYYWS | YIYYIGSTNYNPSLKS | EGSSGYYRYFDP |
| | | SEQ ID NO: 154 | SEQ ID NO: 155 | SEQ ID NO: 920 |
| 14079 | AA | RYGIH | VIWYEGSNKYYAESVKG | RAGIPGTTGYYYGMDV |
| | | SEQ ID NO: 160 | SEQ ID NO: 921 | SEQ ID NO: 162 |
| 14073 | AA | SYFIH | IINPISVSTSYAQKFQG | GGIQLYLHLDY |
| 14076 | | SEQ ID NO: 1 | SEQ ID NO: 2 | SEQ ID NO: 3 |
| | AA | SYGMH | VIWYDGSNKYYADSVKG | RAGIIGTTGYYYGMDV |
| | | SEQ ID NO: 4 | SEQ ID NO: 5 | SEQ ID NO: 6 |

TABLE IVb
LIGHT CHAIN CDRs

| Ab | Type | CDR 1 | CDR 2 | CDR 3 |
|---|---|---|---|---|
| 14039 | AA | SGDRLGEKYTS | QDTKRPS | QAWESSTVV |
| 14302 | | SEQ ID NO: 922 | SEQ ID NO: 197 | SEQ ID NO: 923 |
| 14303 | | | | |
| 14301 | AA | SGDRLGEKYTC | QDTKRPS | QAWESSTVV |
| | | SEQ ID NO: 196 | SEQ ID NO: 197 | SEQ ID NO: 923 |
| 14022 | AA | RASRQISSSYLA | GPSSRAT | QQYGSSFT |
| 14024 | | SEQ ID NO: 924 | SEQ ID NO: 215 | SEQ ID NO: 216 |
| 14025 | | | | |
| 14026 | | | | |
| 14027 | | | | |
| 14028 | | | | |
| 14029 | AA | RASQSISSSYLA | GPSSRAT | QQYGSSFT |
| | | SEQ ID NO: 925 | SEQ ID NO: 215 | SEQ ID NO: 216 |
| 14058 | AA | TGSSSNIGTGYAVH | GNNNRPS | QSYESRLSGWV |
| 14059 | | SEQ ID NO: 220 | SEQ ID NO: 221 | SEQ ID NO: 926 |
| 14050 | AA | TGSSSNIGTGYDVH | GNSNRPS | QSYESSLSGWV |
| 14051 | | SEQ ID NO: 250 | SEQ ID NO: 251 | SEQ ID NO: 927 |
| 14063 | AA | SGSSSNIGSNFVN | TNNQRPS | ATWDESLQGWV |
| | | SEQ ID NO: 292 | SEQ ID NO: 293 | SEQ ID NO: 928 |
| 14064 | AA | SGSSSNIGSNFVN | TNNQRPS | ATYDDSLNGWV |
| | | SEQ ID NO: 292 | SEQ ID NO: 293 | SEQ ID NO: 929 |
| 14099 | AA | SGSSSNIGSNFVN | TNNQRPS | ATWDESMQGWV |
| | | SEQ ID NO: 298 | SEQ ID NO: 299 | SEQ ID NO: 930 |
| 14100 | AA | SGSSSNIGSNFVN | TNNQRPS | ATYDESMQGWV |
| | | SEQ ID NO: 298 | SEQ ID NO: 299 | SEQ ID NO: 931 |
| 14101 | AA | SGSSSNIGSNFVN | TNNQRPS | ATYDDSMNGWV |
| | | SEQ ID NO: 298 | SEQ ID NO: 299 | SEQ ID NO: 932 |
| 14096 | AA | SGSSSNIGRNFVN | TNNQRPS | AAWDESLNGWV |
| | | SEQ ID NO: 304 | SEQ ID NO: 305 | SEQ ID NO: 933 |
| 14097 | AA | SGSSSNIGRNFVN | TNNQRPS | AAWDESLQGWV |
| | | SEQ ID NO: 304 | SEQ ID NO: 305 | SEQ ID NO: 934 |
| 14090 | AA | SGSRSNIGSNFVN | TNYQRPS | AVWDESLNGWV |
| 14091 | | SEQ ID NO: 310 | SEQ ID NO: 311 | SEQ ID NO: 935 |
| 14092 | AA | SGSRSNIGSNFVN | TNYQRPS | AVYDESLQGWV |
| | | SEQ ID NO: 310 | SEQ ID NO: 311 | SEQ ID NO: 936 |
| 14085 | AA | SGSRSNIGSNFVN | TNNQRPS | AVYDDSLNGWV |
| | | SEQ ID NO: 316 | SEQ ID NO: 317 | SEQ ID NO: 937 |
| 14086 | AA | SGSRSNIGSNFVN | TNNQRPS | AVYDESLQGWV |
| 14087 | | SEQ ID NO: 316 | SEQ ID NO: 317 | SEQ ID NO: 938 |
| 14077 | AA | SGDRLGEKYVS | QDNKWPS | QAWDSSTVV |
| 14078 | | SEQ ID NO: 939 | SEQ ID NO: 329 | SEQ ID NO: 330 |
| 14304 | | | | |
| 14079 | AA | SGDRLGEKYVS | QDNKWPS | QAWESSTVV |
| | | SEQ ID NO: 939 | SEQ ID NO: 329 | SEQ ID NO: 940 |
| 14080 | AA | SGDRLGEKYVY | QDNKWPS | QAWDSSTVV |
| | | SEQ ID NO: 941 | SEQ ID NO: 329 | SEQ ID NO: 330 |
| 14075 | AA | SGSRSNIGSNFVN | TNNQRPS | ATWDESMQGWV |
| | | SEQ ID NO: 334 | SEQ ID NO: 335 | SEQ ID NO: 942 |
| 14076 | AA | SGSRSNIGSNFVN | TNNQRPS | ATYDESMQGWV |
| | | SEQ ID NO: 334 | SEQ ID NO: 335 | SEQ ID NO: 943 |

### Human and Cynomologous Monkey Cadherin-19 Sequences

TABLE V

| SEQ | | | | |
|---|---|---|---|---|
| ID | | | | |
| NO. | DESIGNATION | SOURCE | TYPE | SEQUENCE |
| 944 | Human | Human | aa | MNCYLLLRFMLGIPLLWPCLGATENSQTKKVKQPVRSHLRVKR |
| | Cadherin-19 | | | GWVWNQFFVPEEMNTTSHHIGQLRSDLDNGNNSFQYKLLGAGA |
| | | | | GSTFIIDERTGDIYAIQKLDREERSLYILRAQVIDIATGRAVE |
| | | | | PESEFVIKVSDINDNEPKFLDEPYEAIVPEMSPEGTLVIQVTA |
| | | | | SDADDPSSGNNARLLYSLLQGQPYFSVEPTTGVIRISSKMDRE |
| | | | | LQDEYWVIIQAKDMIGQPGALSGTTSVLIKLSDVNDNKPIFKE |
| | | | | SLYRLTVSESAPTGTSIGTIMAYDNDIGENAEMDYSIEEDDSQ |
| | | | | TFDIITNHETQEGIVILKKKVDFEHQNHYGIRAKVKNHHVPEQ |
| | | | | LMKYHTEASTTFIKIQVEDVDEPPLFLLPYYVFEVFEETPQGS |
| | | | | FVGVVSATDPDNRKSPIRYSITRSKVFNINDNGTITTSNSLDR |
| | | | | EISAWYNLSITATEKYNIEQISSIPLYVQVLNINDHAPEFSQY |
| | | | | YETYVCENAGSGQVIQTISAVDRDESIEEHHFYFNLSVEDTNN |
| | | | | SSFTIIDNQDNTAVILTNRTGFNLQEEPVFYISILIADNGIPS |
| | | | | LTSTNTLTIHVCDCGDSGSTQTCQYQELVLSMGFKTEVIIAIL |
| | | | | ICIMIIFGFIFLTLGLKQRRKQILFPEKSEDFRENIFQYDDEG |
| | | | | GGEEDTEAFDIAELRSSTIMRERKTRKTTSAEIRSLYRQSLQV |
| | | | | GPDSAIFRKFILEKLEEANTDPCAPPFDSLQTYAFEGTGSLAG |
| | | | | SLSSLESAVSDQDESYDYLNELGPRFKRLACMFGSAVQSNN |
| 945 | Human | Human | nt | atgaactgttatttactgctgcgttttatgttgggaattcctc |
| | Cadherin-19 | | | tcctatggccttgtcttggagcaacagaaaactctcaaacaaa |
| | | | | gaaagtcaagcagccagtgcgatctcatttgagagtgaagcgt |
| | | | | ggctgggtgtggaaccaattttttgtaccagaggaaatgaata |
| | | | | cgactagtcatcacatcggccagctaagatctgatttagacaa |
| | | | | tggaaacaattctttccagtacaagcttttgggagctggagct |
| | | | | ggaagtacttttatcattgatgaaagaacaggtgacatatatg |
| | | | | ccatacagaagcttgatagagaggagcgatccctctacatctt |
| | | | | aagagcccaggtaatagacatcgctactggaagggctgtggaa |
| | | | | cctgagtctgagtttgtcatcaaagtttcggatatcaatgaca |
| | | | | atgaaccaaaattcctagatgaaccttatgaggccattgtacc |
| | | | | agagatgtctccagaaggaacattagttatccaggtgacagca |
| | | | | agtgatgctgacgatccctcaagtggtaataatgctcgtctcc |
| | | | | tctacagcttacttcaaggccagccatatttttctgttgaacc |
| | | | | aacaacaggagtcataagaatatcttctaaaatggatagagaa |
| | | | | ctgcaagatgagtattgggtaatcattcaagccaaggacatga |
| | | | | ttggtcagccaggagcgttgtctggaacaacaagtgtattaat |
| | | | | taaactttcagatgttaatgacaataagcctatatttaaagaa |
| | | | | agtttataccgcttgactgtctctgaatctgcacccactggga |
| | | | | cttctataggaacaatcatggcatatgataatgacataggaga |
| | | | | gaatgcagaaatggattacagcattgaagaggatgattcgcaa |
| | | | | acatttgacattattactaatcatgaaactcaagaaggaatag |
| | | | | ttatattaaaaaagaaagtggattttgagcaccagaaccacta |
| | | | | cggtattagagcaaaagttaaaaaccatcatgttcctgagcag |
| | | | | ctcatgaagtaccacactgaggcttccaccactttcattaaga |
| | | | | tccaggtggaagatgttgatgagcctcctcttttcctccttcc |
| | | | | atattatgtatttgaagtttttgaagaaaccccacagggatca |
| | | | | tttgtaggcgtggtgtctgccacagacccagacaataggaaat |
| | | | | ctcctatcaggtattctattactaggagcaaagtgttcaatat |
| | | | | caatgataatggtacaatcactacaagtaactcactggatcgt |
| | | | | gaaatcagtgcttggtacaacctaagtattacagccacagaaa |
| | | | | aatacaatatagaacagatctcttcgatcccactgtatgtgca |
| | | | | agttcttaacatcaatgatcatgctcctgagttctctcaatac |
| | | | | tatgagacttatgtttgtgaaaatgcaggctctggtcaggtaa |
| | | | | ttcagactatcagtgcagtggatagagatgaatccatagaaga |
| | | | | gcaccatttttactttaatctatctgtagaagacactaacaat |
| | | | | tcaagttttacaatcatagataatcaagataacacagctgtca |
| | | | | ttttgactaatagaactggttttaaccttcaagaagaacctgt |
| | | | | cttctacatctccatcttaattgccgacaatggaatcccgtca |
| | | | | cttacaagtacaaacacccttaccatccatgtctgtgactgtg |
| | | | | gtgacagtgggagcacacagacctgccagtaccaggagcttgt |
| | | | | gctttccatgggattcaagacagaagtcatcattgctattctc |
| | | | | atttgcattatgatcatatttgggtttatttttttgactttgg |
| | | | | gtttaaaacaacggagaaaacagattctatttcctgagaaaag |
| | | | | tgaagatttcagagagaatatattccaatatgatgatgaaggg |
| | | | | ggtggagaagaagatacagaggcctttgatatagcagagctga |
| | | | | ggagtagtaccataatgcgggaacgcaagactcggaaaaccac |
| | | | | aagcgctgagatcaggagcctatacaggcagtctttgcaagtt |
| | | | | ggccccgacagtgccatattcaggaaattcattctggaaaagc |
| | | | | tcgaagaagctaatactgatccgtgtgcccctccttttgattc |
| | | | | cctccagacctacgcttttgagggaacagggtcattagctgga |
| | | | | tccctgagctccttagaatcagcagtctctgatcaggatgaaa |
| | | | | gctatgattaccttaatgagttgggacctcgctttaaaagatt |
| | | | | agcatgcatgtttggttctgcagtgcagtcaaataattag |
| 946 | Cyno | Macaca | aa | MNCYLLLPFMLGIPLLWPCLGATENSQTKKVQQPVGSHLRVKR |
| | Cadherin-19 | fascicularis | | GWVWNQFFVPEEMNTTSHHVGRLRSDLDNGNNSFQYKLLGAGA |
| | | | | GSTFIIDERTGDIYAIEKLDREERSLYILRAQVIDITTGRAVE |
| | | | | PESEFVIKVSDINDNEPKFLDEPYEAIVPEMSPEGTLVIQVTA |
| | | | | SDADDPSSGNNARLLYSLLQGQPYFSVEPTTGVIRISSKMDRE |
| | | | | LQDEYWVIIQAKDMIGQPGALSGTTSVLIKLSDVNDNKPIFKE |
| | | | | SLYRLTVSESAPTGTSIGTIMAYDNDIGENAEMDYSIEEDDSQ |
| | | | | TFDIITNHETQEGIVILKKKVNFEHQNHYGIRAKVKNHHVDEQ |
| | | | | LMKYHTEASTTFIKIQVEDVDEPPLFLLPYYIFEIFEETPQGS |
| | | | | FVGVVSATDPDNRKSPIRYSITRSKVFNIDDNGTITTTNSLDR |
| | | | | EISAWYNLSITATEKYNIEQISSIPVYVQVLNINDHAPEFSQY |
| | | | | YESYVCENAGSGQVIQTISAVDRDESIEEHHFYFNLSVEDTNS |
| | | | | SSFTIIDNQDNTAVILTNRTGFNLQEEPIFYISILIADNGIPS |
| | | | | LTSTNTLTIHVCDCDDSGSTQTCQYQELMLSMGFKTEVIIAIL |
| | | | | ICIMVIFGFIFLTLGLKQRRKQILFPEKSEDFRENIFRYDDEG |
| | | | | GGEEDTEAFDVAALRSSTIMRERKTRKTTSAEIRSLYRQSLQV |
| | | | | GPDSAIFRKFILEKLEEADTDPCAPPFDSLQTYAFEGTGSLAG |
| | | | | SLSSLESAVSDQDESYDYLNELGPRFKRLACMFGSAVQSNN |
| 947 | Cyno | Macaca | nt | ATGAATTGTTATTTACTGCTGCCTTTTATGTTGGGAATTCCTC |
| | Cadherin-19 | fascicularis | | TCCTATGGCCTTGTCTTGGAGCAACAGAAAACTCTCAAACAAA |
| | | | | GAAAGTCCAGCAGCCAGTAGGATCTCATCTGAGAGTGAAGCGT |
| | | | | GGCTGGGTGTGGAACCAATTTTTTGTACCAGAGGAAATGAATA |
| | | | | CGACTAGTCATCACGTTGGCCGGCTAAGATCTGATTTAGACAA |
| | | | | TGGAAACAATTCTTTCCAGTACAAGCTTTTGGGAGCTGGAGCT |
| | | | | GGAAGTACTTTTATCATTGATGAAAGAACAGGTGACATATATG |
| | | | | CCATAGAGAAGCTTGATAGAGAGGAGCGATCCCTCTACATCTT |
| | | | | AAGAGCCCAGGTAATAGACATCACTACTGGAAGGGCTGTGGAA |
| | | | | CCTGAGTCTGAGTTTGTCATCAAAGTTTCGGATATCAATGACA |
| | | | | ATGAACCAAAATTCCTAGATGAACCTTATGAGGCCATTGTACC |
| | | | | AGAGATGTCTCCAGAAGGAACATTAGTCATCCAGGTGACAGCA |
| | | | | AGTGATGCTGATGACCCTTCAAGTGGTAATAATGCTCGTCTCC |
| | | | | TCTACAGCTTATTACAAGGCCAGCCATATTTTTCTGTTGAACC |
| | | | | AACAACAGGAGTCATAAGAATATCTTCTAAAATGGATAGAGAA |
| | | | | CTGCAAGATGAGTATTGGGTAATCATTCAAGCCAAGGACATGA |
| | | | | TTGGTCAGCCAGGAGCGTTGTCTGGAACAACGAGTGTATTAAT |
| | | | | TAAACTTTCAGATGTTAATGACAATAAGCCTATATTTAAAGAA |
| | | | | AGTTTATACCGCCTGACGGTCTCTGAATCTGCACCCACTGGGA |
| | | | | CTTCTATAGGAACAATCATGGCATATGATAATGACATAGGAGA |
| | | | | GAATGCAGAAATGGATTACAGCATTGAAGAGGATGATTCACAG |
| | | | | ACATTTGACATTATTACTAATCATGAAACTCAAGAAGGAATAG |
| | | | | TTATATTAAAAAAGAAAGTGAATTTTGAGCACCAGAACCACTA |
| | | | | TGGTATTAGAGCAAAAGTTAAAAACCATCATGTTGATGAGCAG |
| | | | | CTCATGAAATACCACACTGAAGCTTCCACCACTTTCATTAAGA |
| | | | | TCCAGGTGGAAGATGTTGATGAGCCTCCTCTTTTCCTCCTTCC |
| | | | | GTATTACATATTTGAAATTTTTGAAGAAACCCCACAAGGATCA |
| | | | | TTTGTAGGCGTGGTGTCTGCCACAGACCCAGACAATAGGAAAT |
| | | | | CTCCTATCAGGTATTCTATTACTAGGAGCAAAGTGTTCAATAT |
| | | | | CGATGATAATGGTACAATCACTACAACTAACTCACTGGATCGG |
| | | | | GAAATCAGTGCTTGGTACAACCTAAGTATTACAGCCACAGAAA |
| | | | | AATACAATATAGAGCAGATCTCTTCGATCCCAGTGTATGTGCA |
| | | | | AGTTCTTAATATCAATGATCATGCTCCTGAGTTCTCTCAATAC |
| | | | | TATGAGAGTTATGTTTGTGAAAATGCAGGCTCTGGTCAGGTAA |
| | | | | TTCAGACTATCAGTGCAGTGGATAGAGATGAATCCATAGAAGA |
| | | | | GCACCATTTTTACTTTAATCTATCTGTAGAAGACACTAACTCT |
| | | | | TCAAGTTTTACAATCATAGACAATCAAGATAACACAGCTGTCA |
| | | | | TTTTGACTAATAGAACTGGTTTTAACCTTCAAGAAGAGCCCAT |
| | | | | CTTCTACATCTCCATCTTAATTGCCGACAATGGAATCCCGTCA |
| | | | | CTTACAAGTACAAACACCCTTACCATCCATGTCTGTGACTGTG |
| | | | | ATGACAGTGGGAGCACACAGACCTGCCAGTACCAGGAGCTTAT |
| | | | | GCTTTCCATGGGATTCAAGACAGAAGTCATCATTGCTATTCTC |
| | | | | ATTTGCATTATGGTAATATTTGGGTTTATTTTTTTGACTTTGG |
| | | | | GTTTAAAACAACGGAGAAAACAGATTCTATTTCCTGAGAAAAG |
| | | | | TGAAGATTTCAGAGAGAATATATTCCGATATGATGACGAAGGG |
| | | | | GGTGGAGAAGAAGATACAGAGGCCTTTGACGTAGCAGCGCTGA |
| | | | | GGAGTAGCACCATAATGCGGGAACGCAAGACTCGGAAAACCAC |
| | | | | CAGCGCTGAGATCAGGAGCCTATACAGGCAGTCTTTGCAAGTT |
| | | | | GGCCCCGACAGTGCCATATTCAGGAAGTTCATCCTGGAAAAGC |
| | | | | TCGAAGAAGCTGATACTGATCCGTGTGCCCCTCCTTTTGATTC |
| | | | | CCTCCAGACCTACGCTTTTGAGGGAACAGGGTCATTAGCTGGA |
| | | | | TCCCTGAGCTCCTTAGAATCAGCTGTCTCTGATCAGGATGAAA |
| | | | | GCTATGATTACCTTAACGAGTTGGGACCTCGCTTTAAAAGATT |
| | | | | AGCATGCATGTTTGGTTCTGCAGTGCAGTCAAATAATTAG |
| 948 | secreted | Human | aa | MNCYLLLRFMLGIPLLWPCLGATENSQTKKVKQPVRSHLRVKR |
| | Cadherin-19 | | | GWVWNQFFVPEEMNTTSHHIGQLRSDLDNGNNSFQYKLLGAGA |
| | ecto-domain | | | GSTFIIDERTGDIYAIQKLDREERSLYILRAQVIDIATGRAVE |
| | (amino acids | | | PESEFVIKVSDINDNEPKFLDEPYEAIVPEMSPEGTLVIQVTA |
| | 1-596) | | | SDADDPSSGNNARLLYSLLQGQPYFSVEPTTGVIRISSKMDRE |
| | | | | LQDEYWVIIQAKDMIGQPGALSGTTSVLIKLSDVNDNKPIFKE |
| | | | | SLYRLTVSESAPTGTSIGTIMAYDNDIGENAEMDYSIEEDDSQ |
| | | | | TFDIITNHETQEGIVILKKKVDFEHQNHYGIRAKVKNHHVPEQ |
| | | | | LMKYHTEASTTFIKIQVEDVDEPPLFLLPYYVFEVFEETPQGS |
| | | | | FVGVVSATDPDNRKSPIRYSITRSKVFNINDNGTITTSNSLDR |
| | | | | EISAWYNLSITATEKYNIEQISSIPLYVQVLNINDHAPEFSQY |
| | | | | YETYVCENAGSGQVIQTISAVDRDESIEEHHFYFNLSVEDTNN |
| | | | | SSFTIIDNQDNTAVILTNRTGFNLQEEPVFYISILIADNGIPS |
| | | | | LTSTNTLTIHVCDCGDSGSTQTCQYQELVLSMGFKTE |
| 949 | secreted | Human | nt | atgaactgttatttactgctgcgttttatgttgggaattcctc |
| | Cadherin-19 | | | tcctatggccttgtcttggagcaacagaaaactctcaaacaaa |
| | ecto-domain | | | gaaagtcaagcagccagtgcgatctcatttgagagtgaagcgt |
| | (amino acids | | | ggctgggtgtggaaccaattttttgtaccagaggaaatgaata |
| | 1-596) | | | cgactagtcatcacatcggccagctaagatctgatttagacaa |
| | | | | tggaaacaattctttccagtacaagcttttgggagctggagct |
| | | | | ggaagtacttttatcattgatgaaagaacaggtgacatatatg |
| | | | | ccatacagaagcttgatagagaggagcgatccctctacatctt |
| | | | | aagagcccaggtaatagacatcgctactggaagggctgtggaa |
| | | | | cctgagtctgagtttgtcatcaaagtttcggatatcaatgaca |
| | | | | atgaaccaaaattcctagatgaaccttatgaggccattgtacc |
| | | | | agagatgtctccagaaggaacattagttatccaggtgacagca |
| | | | | agtgatgctgacgatccctcaagtggtaataatgctcgtctcc |
| | | | | tctacagcttacttcaaggccagccatatttttctgttgaacc |
| | | | | aacaacaggagtcataagaatatcttctaaaatggatagagaa |
| | | | | ctgcaagatgagtattgggtaatcattcaagccaaggacatga |
| | | | | ttggtcagccaggagcgttgtctggaacaacaagtgtattaat |
| | | | | taaactttcagatgttaatgacaataagcctatatttaaagaa |
| | | | | agtttataccgcttgactgtctctgaatctgcacccactggga |
| | | | | cttctataggaacaatcatggcatatgataatgacataggaga |
| | | | | gaatgcagaaatggattacagcattgaagaggatgattcgcaa |
| | | | | acatttgacattattactaatcatgaaactcaagaaggaatag |
| | | | | ttatattaaaaaagaaagtggattttgagcaccagaaccacta |
| | | | | cggtattagagcaaaagttaaaaaccatcatgttcctgagcag |
| | | | | ctcatgaagtaccacactgaggcttccaccactttcattaaga |
| | | | | tccaggtggaagatgttgatgagcctcctcttttcctccttcc |
| | | | | atattatgtatttgaagtttttgaagaaaccccacagggatca |
| | | | | tttgtaggcgtggtgtctgccacagacccagacaataggaaat |
| | | | | ctcctatcaggtattctattactaggagcaaagtgttcaatat |
| | | | | caatgataatggtacaatcactacaagtaactcactggatcgt |
| | | | | gaaatcagtgcttggtacaacctaagtattacagccacagaaa |
| | | | | aatacaatatagaacagatctcttcgatcccactgtatgtgca |
| | | | | agttcttaacatcaatgatcatgctcctgagttctctcaatac |
| | | | | tatgagacttatgtttgtgaaaatgcaggctctggtcaggtaa |
| | | | | ttcagactatcagtgcagtggatagagatgaatccatagaaga |
| | | | | gcaccatttttactttaatctatctgtagaagacactaacaat |
| | | | | tcaagttttacaatcatagataatcaagataacacagctgtca |
| | | | | ttttgactaatagaactggttttaaccttcaagaagaacctgt |
| | | | | cttctacatctccatcttaattgccgacaatggaatcccgtca |
| | | | | cttacaagtacaaacacccttaccatccatgtctgtgactgtg |
| | | | | gtgacagtgggagcacacagacctgccagtaccaggagcttgt |
| | | | | gctttccatgggattcaagacagaa |
| 950 | truncated | Human | aa | MNCYLLLRFMLGIPLLWPCLGATENSQTKKVKQPVRSHLRVKR |
| | membrane | | | GWVWNQFFVPEEMNTTSHHIGQLRSDLDNGNNSFQYKLLGAGA |
| | bound form of | | | GSTFIIDERTGDIYAIQKLDREERSLYILRAQVIDIATGRAVE |
| | human | | | PESEFVIKVSDINDNEPKFLDEPYEAIVPEMSPEGTLVIQVTA |
| | cadherin-19 | | | SDADDPSSGNNARLLYSLLQGQPYFSVEPTTGVIRISSKMDRE |
| | (amino acids | | | LQDEYWVIIQAKDMIGQPGALSGTTSVLIKLSDVNDNKPIFKE |
| | 1-624) | | | SLYRLTVSESAPTGTSIGTIMAYDNDIGENAEMDYSIEEDDSQ |
| | | | | TFDIITNHETQEGIVILKKKVDFEHQNHYGIRAKVKNHHVPEQ |
| | | | | LMKYHTEASTTFIKIQVEDVDEPPLFLLPYYVFEVFEETPQGS |
| | | | | FVGVVSATDPDNRKSPIRYSITRSKVFNINDNGTITTSNSLDR |
| | | | | EISAWYNLSITATEKYNIEQISSIPLYVQVLNINDHAPEFSQY |
| | | | | YETYVCENAGSGQVIQTISAVDRDESIEEHHFYFNLSVEDTNN |
| | | | | SSFTIIDNQDNTAVILTNRTGFNLQEEPVFYISILIADNGIPS |
| | | | | LTSTNTLTIHVCDCGDSGSTQTCQYQELVLSMGFKTEVIIAIL |
| | | | | ICIMIIFGFIFLTLGLKQRRKQ |
| 951 | truncated | Humanl | nt | atgaactgttatttactgctgcgttttatgttgggaattcctc |
| | membrane | | | tcctatggccttgtcttggagcaacagaaaactctcaaacaaa |
| | bound form of | | | gaaagtcaagcagccagtgcgatctcatttgagagtgaagcgt |
| | human | | | ggctgggtgtggaaccaattttttgtaccagaggaaatgaata |
| | cadherin-19 | | | cgactagtcatcacatcggccagctaagatctgatttagacaa |
| | (amino acids | | | tggaaacaattctttccagtacaagcttttgggagctggagct |
| | 1-624) | | | ggaagtacttttatcattgatgaaagaacaggtgacatatatg |
| | | | | ccatacagaagcttgatagagaggagcgatccctctacatctt |
| | | | | aagagcccaggtaatagacatcgctactggaagggctgtggaa |
| | | | | cctgagtctgagtttgtcatcaaagtttcggatatcaatgaca |
| | | | | atgaaccaaaattcctagatgaaccttatgaggccattgtacc |
| | | | | agagatgtctccagaaggaacattagttatccaggtgacagca |
| | | | | agtgatgctgacgatccctcaagtggtaataatgctcgtctcc |
| | | | | tctacagcttacttcaaggccagccatatttttctgttgaacc |
| | | | | aacaacaggagtcataagaatatcttctaaaatggatagagaa |
| | | | | ctgcaagatgagtattgggtaatcattcaagccaaggacatga |
| | | | | ttggtcagccaggagcgttgtctggaacaacaagtgtattaat |
| | | | | taaactttcagatgttaatgacaataagcctatatttaaagaa |
| | | | | agtttataccgcttgactgtctctgaatctgcacccactggga |
| | | | | cttctataggaacaatcatggcatatgataatgacataggaga |
| | | | | gaatgcagaaatggattacagcattgaagaggatgattcgcaa |
| | | | | acatttgacattattactaatcatgaaactcaagaaggaatag |
| | | | | ttatattaaaaaagaaagtggattttgagcaccagaaccacta |
| | | | | cggtattagagcaaaagttaaaaaccatcatgttcctgagcag |
| | | | | ctcatgaagtaccacactgaggcttccaccactttcattaaga |
| | | | | tccaggtggaagatgttgatgagcctcctcttttcctccttcc |
| | | | | atattatgtatttgaagtttttgaagaaaccccacagggatca |
| | | | | tttgtaggcgtggtgtctgccacagacccagacaataggaaat |
| | | | | ctcctatcaggtattctattactaggagcaaagtgttcaatat |
| | | | | caatgataatggtacaatcactacaagtaactcactggatcgt |
| | | | | gaaatcagtgcttggtacaacctaagtattacagccacagaaa |
| | | | | aatacaatatagaacagatctcttcgatcccactgtatgtgca |
| | | | | agttcttaacatcaatgatcatgctcctgagttctctcaatac |
| | | | | tatgagacttatgtttgtgaaaatgcaggctctggtcaggtaa |
| | | | | ttcagactatcagtgcagtggatagagatgaatccatagaaga |
| | | | | gcaccatttttactttaatctatctgtagaagacactaacaat |
| | | | | tcaagttttacaatcatagataatcaagataacacagctgtca |
| | | | | ttttgactaatagaactggttttaaccttcaagaagaacctgt |
| | | | | cttctacatctccatcttaattgccgacaatggaatcccgtca |
| | | | | cttacaagtacaaacacccttaccatccatgtctgtgactgtg |
| | | | | gtgacagtgggagcacacagacctgccagtaccaggagcttgt |
| | | | | gctttccatgggattcaagacagaagtcatcattgctattctc |
| | | | | atttgcattatgatcatatttgggtttatttttttgactttgg |
| | | | | gtttaaaacaacggagaaaacag |
| 952 | C137897 | artificial | aa | GWVWNQFFVPEEMNTTSHHIGQLRSDLDNGNNSFQYKLLGAGA |
| | huCDH19 | | | GSTFIIDERTGDIYAIQKLDREERSLYILRAQVIDIATGRAVE |
| | (44-141) | | | PESEFVIKVSDINDNEPRFLDEPYEAIVPEMSPEGTFVIKVTA |
| | muCDH19 | | | NDADDPSTGYHARILYNLERGQPYFSVEPTTGVIRISSKMDRE |
| | (140-770) | | | LQDTYCVIIQAKDMLGQPGALSGTTTVSIKLSDINDNKPIFKE |
| | | | | SFYRFTISESAPIGTSIGKIMAYDDDIGENAEMEYSIEDDDSK |
| | | | | IFDIIIDNDTQEGIVILKKKVDFEQQSYYGIRAKVKNCHVDEE |
| | | | | LAPAHVNASTTYIKVQVEDEDEPPVFLLPYYILEIPEGKPYGT |
| | | | | IVGTVSATDPDRRQSPMRYYLTGSKMFDINDNGTIITTNMLDR |
| | | | | EVSAWYNLTVTATETYNVQQISSAHVYVQVFNINDNAPEFSQF |
| | | | | YETYVCENAESGEIVQIISAIDRDESIEDHHFYFNHSLEDTNN |
| | | | | SSFMLTDNQDNTAVILSNRTGFNLKEEPVFYMIILIADNGIPS |
| | | | | LTSTNTLTIQVCDCGDSRNTETCANKGLLFIMGFRTEAIIAIM |
| | | | | ICVMVIFGFFFLILALKQRRKETLFPEKTEDFRENIFCYDDEG |
| | | | | GGEEDSEAFDIVELRQSTVMRERKPQRSKSAEIRSLYRQSLQV |
| | | | | GPDSAIFRKFILEKLEEANTDPCAPPFDSLQTFAYEGTGSSAG |
| | | | | SLSSLASRDTDQEDDFDYLNDLGPRFKRLASMFGSAVQPNN |
| 953 | C137897 | artificial | nt | ggctgggtgtggaaccaattttttgtaccagaggaaatgaata |
| | huCDH19 | | | cgactagtcatcacatcggccagctaagatctgatttagacaa |
| | (44-141) | | | tggaaacaattctttccagtacaagcttttgggagctggagct |
| | muCDH19 | | | ggaagtacttttatcattgatgaaagaacaggtgacatatatg |
| | (140-770) | | | ccatacagaagcttgatagagaggagcgatccctctacatctt |
| | | | | aagagcccaggtaatagacatcgctactggaagggctgtggaa |
| | | | | cctgagtctgagtttgtcatcaaagtttcggatatcaatgaca |
| | | | | atgaacccagattcctagatgaaccatatgaggccattgtacc |
| | | | | tgagatgtctccagaaggaacatttgtcatcaaggtgacagcc |
| | | | | aatgacgcagatgatccttcaactggctatcatgctcgcatcc |
| | | | | tatacaacttagaacgaggtcaaccatacttttctgttgagcc |
| | | | | aacaacaggagtcataaggatatcttctaagatggatagagag |
| | | | | ttgcaagatacatactgtgtaattattcaagccaaggacatgc |
| | | | | tcggtcagcctggagccttgtctggaacaacaaccgtatcaat |
| | | | | taagctgtcagatattaatgacaacaagccaatattcaaagaa |
| | | | | agtttctaccgcttcactatatctgaatctgcacccattggaa |
| | | | | catcaatagggaaaattatggcatatgatgatgacatagggga |
| | | | | gaatgcagagatggagtacagcattgaagatgatgattcaaaa |
| | | | | atatttgacataatcattgacaatgacacccaagaagggatag |
| | | | | ttatacttaaaaagaaagttgattttgagcagcagagctatta |
| | | | | tggcattagagctaaggttaaaaactgccatgtggatgaagag |
| | | | | cttgcacctgcccatgttaacgcttccacaacctacattaaag |
| | | | | ttcaagtagaagatgaagatgaacctcctgttttcctcttacc |
| | | | | atattacatacttgaaattcctgaaggaaaaccatatggaaca |
| | | | | attgtggggacggtttctgccacagacccagatcgaagacaat |
| | | | | ctcctatgagatattatctcactggaagcaaaatgtttgatat |
| | | | | caatgacaatggaacaataatcaccactaacatgcttgacaga |
| | | | | gaggtcagtgcttggtacaacttgactgtcacagctactgaaa |
| | | | | catacaatgtacaacagatctcttcagcccatgtttatgtaca |
| | | | | agtctttaacattaacgacaatgctccagagttctctcaattc |
| | | | | tatgagacttatgtttgtgaaaatgctgaatctggtgagatag |
| | | | | ttcagatcatcagtgcaattgatagagatgagtccatagaaga |
| | | | | tcaccatttttactttaatcactctctggaagacacaaacaac |
| | | | | tcaagttttatgctaacagacaatcaagataacacagctgtaa |
| | | | | ttctgagtaatagaactggtttcaatcttaaagaagagcctgt |
| | | | | cttctacatgatcatcttgattgctgataacgggatcccatct |
| | | | | ctcacaagcacaaacactctcactatccaagtctgtgactgtg |
| | | | | gagacagtagaaacacagaaacttgtgctaacaagggacttct |
| | | | | ctttatcatgggattcagaacagaggcaataattgccatcatg |
| | | | | atatgtgttatggtaatatttgggtttttctttttgattcttg |
| | | | | ctctgaaacagcgaagaaaggagactctatttccagagaagac |
| | | | | tgaagactttagggagaatatattttgctatgatgatgaaggc |
| | | | | ggcggggaagaagactcggaagcctttgacatcgtagagctga |
| | | | | gacaaagtacagtaatgagagaaagaaagcctcagagaagcaa |
| | | | | gagtgcggagatcaggagcttgtacaggcagtccctgcaggtg |
| | | | | ggcccagacagtgccatatttcgaaaatttatcctagagaagc |
| | | | | ttgaagaagccaacacagacccatgtgctcccccctttgattc |
| | | | | actacagacgtttgcctatgagggaacagggtcatcagctggc |
| | | | | tctctgagctccttggcatccagagacactgatcaggaggatg |
| | | | | acttcgactaccttaatgacctgggacctcgttttaaaagatt |
| | | | | agcaagcatgtttggctctgcagtacaacccaacaattag |
| 954 | C137896 | artificial | aa | GWVWNQFFVPEEMNTTSHHIGQLRSDLDNGNNSFQYKLLGAGA |
| | huCDH19 | | | GSTFIIDERTGDIYAIQKLDREERSLYILRAQVIDIATGRAVE |
| | (44-249) | | | PESEFVIKVSDINDNEPKFLDEPYEAIVPEMSPEGTLVIQVTA |
| | muCDH19 | | | SDADDPSSGNNARLLYSLLQGQPYFSVEPTTGVIRISSKMDRE |
| | (248-770) | | | LQDEYWVIIQAKDMIGQPGALSGTTSVLIKLSDVNDNKPIFKE |
| | | | | SFYRFTISESAPIGTSIGKIMAYDDDIGENAEMEYSIEDDDSK |
| | | | | IFDIIIDNDTQEGIVILKKKVDFEQQSYYGIRAKVKNCHVDEE |
| | | | | LAPAHVNASTTYIKVQVEDEDEPPVFLLPYYILEIPEGKPYGT |
| | | | | IVGTVSATDPDRRQSPMRYYLTGSKMFDINDNGTIITTNMLDR |
| | | | | EVSAWYNLTVTATETYNVQQISSAHVYVQVFNINDNAPEFSQF |
| | | | | YETYVCENAESGEIVQIISAIDRDESIEDHHFYFNHSLEDTNN |
| | | | | SSFMLTDNQDNTAVILSNRTGFNLKEEPVFYMIILIADNGIPS |
| | | | | LTSTNTLTIQVCDCGDSRNTETCANKGLLFIMGFRTEAIIAIM |
| | | | | ICVMVIFGFFFLILALKQRRKETLFPEKTEDFRENIFCYDDEG |
| | | | | GGEEDSEAFDIVELRQSTVMRERKPQRSKSAEIRSLYRQSLQV |
| | | | | GPDSAIFRKFILEKLEEANTDPCAPPFDSLQTFAYEGTGSSAG |
| | | | | SLSSLASRDTDQEDDFDYLNDLGPRFKRLASMFGSAVQPNN |
| 955 | C137896 | artificial | nt | ggctgggtgtggaaccaattttttgtaccagaggaaatgaata |
| | huCDH19 | | | cgactagtcatcacatcggccagctaagatctgatttagacaa |
| | (44-249) | | | tggaaacaattctttccagtacaagcttttgggagctggagct |
| | muCDH19 | | | ggaagtacttttatcattgatgaaagaacaggtgacatatatg |
| | (248-770) | | | ccatacagaagcttgatagagaggagcgatccctctacatctt |
| | | | | aagagcccaggtaatagacatcgctactggaagggctgtggaa |
| | | | | cctgagtctgagtttgtcatcaaagtttcggatatcaatgaca |
| | | | | atgaaccaaaattcctagatgaaccttatgaggccattgtacc |
| | | | | agagatgtctccagaaggaacattagttatccaggtgacagca |
| | | | | agtgatgctgacgatccctcaagtggtaataatgctcgtctcc |
| | | | | tctacagcttacttcaaggccagccatatttttctgttgaacc |
| | | | | aacaacaggagtcataagaatatcttctaaaatggatagagaa |
| | | | | ctgcaagatgagtattgggtaatcattcaagccaaggacatga |
| | | | | ttggtcagccaggagcgttgtctggaacaacaagtgtattaat |
| | | | | taaactttcagatgttaatgacaacaagccaatattcaaagaa |
| | | | | agtttctaccgcttcactatatctgaatctgcacccattggaa |
| | | | | catcaatagggaaaattatggcatatgatgatgacatagggga |
| | | | | gaatgcagagatggagtacagcattgaagatgatgattcaaaa |
| | | | | atatttgacataatcattgacaatgacacccaagaagggatag |
| | | | | ttatacttaaaaagaaagttgattttgagcagcagagctatta |
| | | | | tggcattagagctaaggttaaaaactgccatgtggatgaagag |
| | | | | cttgcacctgcccatgttaacgcttccacaacctacattaaag |
| | | | | ttcaagtagaagatgaagatgaacctcctgttttcctcttacc |
| | | | | atattacatacttgaaattcctgaaggaaaaccatatggaaca |
| | | | | attgtggggacggtttctgccacagacccagatcgaagacaat |
| | | | | ctcctatgagatattatctcactggaagcaaaatgtttgatat |
| | | | | caatgacaatggaacaataatcaccactaacatgcttgacaga |
| | | | | gaggtcagtgcttggtacaacttgactgtcacagctactgaaa |
| | | | | catacaatgtacaacagatctcttcagcccatgtttatgtaca |
| | | | | agtctttaacattaacgacaatgctccagagttctctcaattc |
| | | | | tatgagacttatgtttgtgaaaatgctgaatctggtgagatag |
| | | | | ttcagatcatcagtgcaattgatagagatgagtccatagaaga |
| | | | | tcaccatttttactttaatcactctctggaagacacaaacaac |
| | | | | tcaagttttatgctaacagacaatcaagataacacagctgtaa |
| | | | | ttctgagtaatagaactggtttcaatcttaaagaagagcctgt |
| | | | | cttctacatgatcatcttgattgctgataacgggatcccatct |
| | | | | ctcacaagcacaaacactctcactatccaagtctgtgactgtg |
| | | | | gagacagtagaaacacagaaacttgtgctaacaagggacttct |
| | | | | ctttatcatgggattcagaacagaggcaataattgccatcatg |
| | | | | atatgtgttatggtaatatttgggtttttctttttgattcttg |
| | | | | ctctgaaacagcgaagaaaggagactctatttccagagaagac |
| | | | | tgaagactttagggagaatatattttgctatgatgatgaaggc |
| | | | | ggcggggaagaagactcggaagcctttgacatcgtagagctga |
| | | | | gacaaagtacagtaatgagagaaagaaagcctcagagaagcaa |
| | | | | gagtgcggagatcaggagcttgtacaggcagtccctgcaggtg |
| | | | | ggcccagacagtgccatatttcgaaaatttatcctagagaagc |
| | | | | ttgaagaagccaacacagacccatgtgctcccccctttgattc |
| | | | | actacagacgtttgcctatgagggaacagggtcatcagctggc |
| | | | | tctctgagctccttggcatccagagacactgatcaggaggatg |
| | | | | acttcgactaccttaatgacctgggacctcgttttaaaagatt |
| | | | | agcaagcatgtttggctctgcagtacaacccaacaattag |
| 956 | C137913 | artificial | aa | AWVWRPFVVLEEMDDIQCVGKLRSDLDNGNNSFQYKLLGIGAG |
| | muCDH19 | | | SFSINERTGEICAIQKLDREEKSLYILRAQVIDTTIGKAVETE |
| | (44-139) | | | SEFVIRVLDINDNEPKFLDEPYEAIVPEMSPEGTLVIQVTASD |
| | huCDH19 | | | ADDPSSGNNARLLYSLLQGQPYFSVEPTTGVIRISSKMDRELQ |
| | (142-249) | | | DEYWVIIQAKDMIGQPGALSGTTSVLIKLSDVNDNKPIFKESF |
| | muCDH19 | | | YRFTISESAPIGTSIGKIMAYDDDIGENAEMEYSIEDDDSKIF |
| | (248-770) | | | DIIIDNDTQEGIVILKKKVDFEQQSYYGIRAKVKNCHVDEELA |
| | | | | PAHVNASTTYIKVQVEDEDEPPVFLLPYYILEIPEGKPYGTIV |
| | | | | GTVSATDPDRRQSPMRYYLTGSKMFDINDNGTIITTNMLDREV |
| | | | | SAWYNLTVTATETYNVQQISSAHVYVQVFNINDNAPEFSQFYE |
| | | | | TYVCENAESGEIVQIISAIDRDESIEDHHFYFNHSLEDTNNSS |
| | | | | FMLTDNQDNTAVILSNRTGFNLKEEPVFYMIILIADNGIPSLT |
| | | | | STNTLTIQVCDCGDSRNTETCANKGLLFIMGFRTEAIIAIMIC |
| | | | | VMVIFGFFFLILALKQRRKETLFPEKTEDFRENIFCYDDEGGG |
| | | | | EEDSEAFDIVELRQSTVMRERKPQRSKSAEIRSLYRQSLQVGP |
| | | | | DSAIFRKFILEKLEEANTDPCAPPFDSLQTFAYEGTGSSAGSL |
| | | | | SSLASRDTDQEDDFDYLNDLGPRFKRLASMFGSAVQPNN |
| 957 | C137913 | artificial | nt | gcctgggtgtggagaccatttgttgttctagaagaaatggatg |
| | muCDH19 | | | atatacaatgtgttggaaagctaagatctgacttagacaatgg |
| | (44-139) | | | aaacaactctttccagtacaagctactggggattggcgctgga |
| | huCDH19 | | | agctttagcattaatgaaagaacaggtgaaatatgtgccatac |
| | (142-249) | | | agaagcttgatagagaggaaaaatccctctacattctgagagc |
| | muCDH19 | | | ccaggtaatagacaccactattgggaaggctgtggaaactgaa |
| | (248-770) | | | tccgagtttgtcatcagagttttggatatcaatgacaatgaac |
| | | | | caaaattcctagatgaaccttatgaggccattgtaccagagat |
| | | | | gtctccagaaggaacattagttatccaggtgacagcaagtgat |
| | | | | gctgacgatccctcaagtggtaataatgctcgtctcctctaca |
| | | | | gcttacttcaaggccagccatatttttctgttgaaccaacaac |
| | | | | aggagtcataagaatatcttctaaaatggatagagaactgcaa |
| | | | | gatgagtattgggtaatcattcaagccaaggacatgattggtc |
| | | | | agccaggagcgttgtctggaacaacaagtgtattaattaaact |
| | | | | ttcagatgttaatgacaacaagccaatattcaaagaaagtttc |
| | | | | taccgcttcactatatctgaatctgcacccattggaacatcaa |
| | | | | tagggaaaattatggcatatgatgatgacataggggagaatgc |
| | | | | agagatggagtacagcattgaagatgatgattcaaaaatattt |
| | | | | gacataatcattgacaatgacacccaagaagggatagttatac |
| | | | | ttaaaaagaaagttgattttgagcagcagagctattatggcat |
| | | | | tagagctaaggttaaaaactgccatgtggatgaagagcttgca |
| | | | | cctgcccatgttaacgcttccacaacctacattaaagttcaag |
| | | | | tagaagatgaagatgaacctcctgttttcctcttaccatatta |
| | | | | catacttgaaattcctgaaggaaaaccatatggaacaattgtg |
| | | | | gggacggtttctgccacagacccagatcgaagacaatctccta |
| | | | | tgagatattatctcactggaagcaaaatgtttgatatcaatga |
| | | | | caatggaacaataatcaccactaacatgcttgacagagaggtc |
| | | | | agtgcttggtacaacttgactgtcacagctactgaaacataca |
| | | | | atgtacaacagatctcttcagcccatgtttatgtacaagtctt |
| | | | | taacattaacgacaatgctccagagttctctcaattctatgag |
| | | | | acttatgtttgtgaaaatgctgaatctggtgagatagttcaga |
| | | | | tcatcagtgcaattgatagagatgagtccatagaagatcacca |
| | | | | tttttactttaatcactctctggaagacacaaacaactcaagt |
| | | | | tttatgctaacagacaatcaagataacacagctgtaattctga |
| | | | | gtaatagaactggtttcaatcttaaagaagagcctgtcttcta |
| | | | | catgatcatcttgattgctgataacgggatcccatctctcaca |
| | | | | agcacaaacactctcactatccaagtctgtgactgtggagaca |
| | | | | gtagaaacacagaaacttgtgctaacaagggacttctctttat |
| | | | | catgggattcagaacagaggcaataattgccatcatgatatgt |
| | | | | gttatggtaatatttgggtttttctttttgattcttgctctga |
| | | | | aacagcgaagaaaggagactctatttccagagaagactgaaga |
| | | | | ctttagggagaatatattttgctatgatgatgaaggcggcggg |
| | | | | gaagaagactcggaagcctttgacatcgtagagctgagacaaa |
| | | | | gtacagtaatgagagaaagaaagcctcagagaagcaagagtgc |
| | | | | ggagatcaggagcttgtacaggcagtccctgcaggtgggccca |
| | | | | gacagtgccatatttcgaaaatttatcctagagaagcttgaag |
| | | | | aagccaacacagacccatgtgctcccccctttgattcactaca |
| | | | | gacgtttgcctatgagggaacagggtcatcagctggctctctg |
| | | | | agctccttggcatccagagacactgatcaggaggatgacttcg |
| | | | | actaccttaatgacctgggacctcgttttaaaagattagcaag |
| | | | | catgtttggctctgcagtacaacccaacaattag |
| 958 | C137847 | artificial | aa | AWVWRPFVVLEEMDDIQCVGKLRSDLDNGNNSFQYKLLGIGAG |
| | muCDH19 | | | SFSINERTGEICAIQKLDREEKSLYILRAQVIDTTIGKAVETE |
| | (44-139) | | | SEFVIRVLDINDNEPKFLDEPYEAIVPEMSPEGTLVIQVTASD |
| | huCDH19 | | | ADDPSSGNNARLLYSLLQGQPYFSVEPTTGVIRISSKMDRELQ |
| | (142-364) | | | DEYWVIIQAKDMIGQPGALSGTTSVLIKLSDVNDNKPIFKESL |
| | muCDH19 | | | YRLTVSESAPTGTSIGTIMAYDNDIGENAEMDYSIEEDDSQTF |
| | (363-770) | | | DIITNHETQEGIVILKKKVDFEHQNHYGIRAKVKNHHVPEQLM |
| | | | | KYHTEASTTFIKIQVEDVDEPPVFLLPYYILEIPEGKPYGTIV |
| | | | | GTVSATDPDRRQSPMRYYLTGSKMFDINDNGTIITTNMLDREV |
| | | | | SAWYNLTVTATETYNVQQISSAHVYVQVFNINDNAPEFSQFYE |
| | | | | TYVCENAESGEIVQIISAIDRDESIEDHHFYFNHSLEDTNNSS |
| | | | | FMLTDNQDNTAVILSNRTGFNLKEEPVFYMIILIADNGIPSLT |
| | | | | STNTLTIQVCDCGDSRNTETCANKGLLFIMGFRTEAIIAIMIC |
| | | | | VMVIFGFFFLILALKQRRKETLFPEKTEDFRENIFCYDDEGGG |
| | | | | EEDSEAFDIVELRQSTVMRERKPQRSKSAEIRSLYRQSLQVGP |
| | | | | DSAIFRKFILEKLEEANTDPCAPPFDSLQTFAYEGTGSSAGSL |
| | | | | SSLASRDTDQEDDFDYLNDLGPRFKRLASMFGSAVQPNN |
| 959 | C137847 | artificial | nt | gcctgggtgtggagaccatttgttgttctagaagaaatggatg |
| | muCDH19 | | | atatacaatgtgttggaaagctaagatctgacttagacaatgg |
| | (44-139) | | | aaacaactctttccagtacaagctactggggattggcgctgga |
| | huCDH19 | | | agctttagcattaatgaaagaacaggtgaaatatgtgccatac |
| | (142-364) | | | agaagcttgatagagaggaaaaatccctctacattctgagagc |
| | muCDH19 | | | ccaggtaatagacaccactattgggaaggctgtggaaactgaa |
| | (363-770) | | | tccgagtttgtcatcagagttttggatatcaatgacaatgaac |
| | | | | caaaattcctagatgaaccttatgaggccattgtaccagagat |
| | | | | gtctccagaaggaacattagttatccaggtgacagcaagtgat |
| | | | | gctgacgatccctcaagtggtaataatgctcgtctcctctaca |
| | | | | gcttacttcaaggccagccatatttttctgttgaaccaacaac |
| | | | | aggagtcataagaatatcttctaaaatggatagagaactgcaa |
| | | | | gatgagtattgggtaatcattcaagccaaggacatgattggtc |
| | | | | agccaggagcgttgtctggaacaacaagtgtattaattaaact |
| | | | | ttcagatgttaatgacaataagcctatatttaaagaaagttta |
| | | | | taccgcttgactgtctctgaatctgcacccactgggacttcta |
| | | | | taggaacaatcatggcatatgataatgacataggagagaatgc |
| | | | | agaaatggattacagcattgaagaggatgattcgcaaacattt |
| | | | | gacattattactaatcatgaaactcaagaaggaatagttatat |
| | | | | taaaaaagaaagtggattttgagcaccagaaccactacggtat |
| | | | | tagagcaaaagttaaaaaccatcatgttcctgagcagctcatg |
| | | | | aagtaccacactgaggcttccaccactttcattaagatccagg |
| | | | | tggaagatgttgatgaacctcctgttttcctcttaccatatta |
| | | | | catacttgaaattcctgaaggaaaaccatatggaacaattgtg |
| | | | | gggacggtttctgccacagacccagatcgaagacaatctccta |
| | | | | tgagatattatctcactggaagcaaaatgtttgatatcaatga |
| | | | | caatggaacaataatcaccactaacatgcttgacagagaggtc |
| | | | | agtgcttggtacaacttgactgtcacagctactgaaacataca |
| | | | | atgtacaacagatctcttcagcccatgtttatgtacaagtctt |
| | | | | taacattaacgacaatgctccagagttctctcaattctatgag |
| | | | | acttatgtttgtgaaaatgctgaatctggtgagatagttcaga |
| | | | | tcatcagtgcaattgatagagatgagtccatagaagatcacca |
| | | | | tttttactttaatcactctctggaagacacaaacaactcaagt |
| | | | | tttatgctaacagacaatcaagataacacagctgtaattctga |
| | | | | gtaatagaactggtttcaatcttaaagaagagcctgtcttcta |
| | | | | catgatcatcttgattgctgataacgggatcccatctctcaca |
| | | | | agcacaaacactctcactatccaagtctgtgactgtggagaca |
| | | | | gtagaaacacagaaacttgtgctaacaagggacttctctttat |
| | | | | catgggattcagaacagaggcaataattgccatcatgatatgt |
| | | | | gttatggtaatatttgggtttttctttttgattcttgctctga |
| | | | | aacagcgaagaaaggagactctatttccagagaagactgaaga |
| | | | | ctttagggagaatatattttgctatgatgatgaaggcggcggg |
| | | | | gaagaagactcggaagcctttgacatcgtagagctgagacaaa |
| | | | | gtacagtaatgagagaaagaaagcctcagagaagcaagagtgc |
| | | | | ggagatcaggagcttgtacaggcagtccctgcaggtgggccca |
| | | | | gacagtgccatatttcgaaaatttatcctagagaagcttgaag |
| | | | | aagccaacacagacccatgtgctcccccctttgattcactaca |
| | | | | gacgtttgcctatgagggaacagggtcatcagctggctctctg |
| | | | | agctccttggcatccagagacactgatcaggaggatgacttcg |
| | | | | actaccttaatgacctgggacctcgttttaaaagattagcaag |
| | | | | catgtttggctctgcagtacaacccaacaattag |
| 960 | C137911 | artificial | aa | AWVWRPFVVLEEMDDIQCVGKLRSDLDNGNNSFQYKLLGIGAG |
| | muCDH19 | | | SFSINERTGEICAIQKLDREEKSLYILRAQVIDTTIGKAVETE |
| | (44-247) | | | SEFVIRVLDINDNEPRFLDEPYEAIVPEMSPEGTFVIKVTAND |
| | huCDH19 | | | ADDPSTGYHARILYNLERGQPYFSVEPTTGVIRISSKMDRELQ |
| | (250-364) | | | DTYCVIIQAKDMLGQPGALSGTTTVSIKLSDINDNKPIFKESL |
| | muCDH19 | | | YRLTVSESAPTGTSIGTIMAYDNDIGENAEMDYSIEEDDSQTF |
| | (363-770) | | | DIITNHETQEGIVILKKKVDFEHQNHYGIRAKVKNHHVPEQLM |
| | | | | KYHTEASTTFIKIQVEDVDEPPVFLLPYYILEIPEGKPYGTIV |
| | | | | GTVSATDPDRRQSPMRYYLTGSKMFDINDNGTIITTNMLDREV |
| | | | | SAWYNLTVTATETYNVQQISSAHVYVQVFNINDNAPEFSQFYE |
| | | | | TYVCENAESGEIVQIISAIDRDESIEDHHFYFNHSLEDTNNSS |
| | | | | FMLTDNQDNTAVILSNRTGFNLKEEPVFYMIILIADNGIPSLT |
| | | | | STNTLTIQVCDCGDSRNTETCANKGLLFIMGFRTEAIIAIMIC |
| | | | | VMVIFGFFFLILALKQRRKETLFPEKTEDFRENIFCYDDEGGG |
| | | | | EEDSEAFDIVELRQSTVMRERKPQRSKSAEIRSLYRQSLQVGP |
| | | | | DSAIFRKFILEKLEEANTDPCAPPFDSLQTFAYEGTGSSAGSL |
| | | | | SSLASRDTDQEDDFDYLNDLGPRFKRLASMFGSAVQPNN |
| 961 | C137911 | artificial | nt | gcctgggtgtggagaccatttgttgttctagaagaaatggatg |
| | muCDH19 | | | atatacaatgtgttggaaagctaagatctgacttagacaatgg |
| | (44-247) | | | aaacaactctttccagtacaagctactggggattggcgctgga |
| | huCDH19 | | | agctttagcattaatgaaagaacaggtgaaatatgtgccatac |
| | (250-364) | | | agaagcttgatagagaggaaaaatccctctacattctgagagc |
| | muCDH19 | | | ccaggtaatagacaccactattgggaaggctgtggaaactgaa |
| | (363-770) | | | tccgagtttgtcatcagagttttggatatcaatgacaatgaac |
| | | | | ccagattcctagatgaaccatatgaggccattgtacctgagat |
| | | | | gtctccagaaggaacatttgtcatcaaggtgacagccaatgac |
| | | | | gcagatgatccttcaactggctatcatgctcgcatcctataca |
| | | | | acttagaacgaggtcaaccatacttttctgttgagccaacaac |
| | | | | aggagtcataaggatatcttctaagatggatagagagttgcaa |
| | | | | gatacatactgtgtaattattcaagccaaggacatgctcggtc |
| | | | | agcctggagccttgtctggaacaacaaccgtatcaattaagct |
| | | | | gtcagatattaatgacaataagcctatatttaaagaaagttta |
| | | | | taccgcttgactgtctctgaatctgcacccactgggacttcta |
| | | | | taggaacaatcatggcatatgataatgacataggagagaatgc |
| | | | | agaaatggattacagcattgaagaggatgattcgcaaacattt |
| | | | | gacattattactaatcatgaaactcaagaaggaatagttatat |
| | | | | taaaaaagaaagtggattttgagcaccagaaccactacggtat |
| | | | | tagagcaaaagttaaaaaccatcatgttcctgagcagctcatg |
| | | | | aagtaccacactgaggcttccaccactttcattaagatccagg |
| | | | | tggaagatgttgatgaacctcctgttttcctcttaccatatta |
| | | | | catacttgaaattcctgaaggaaaaccatatggaacaattgtg |
| | | | | gggacggtttctgccacagacccagatcgaagacaatctccta |
| | | | | tgagatattatctcactggaagcaaaatgtttgatatcaatga |
| | | | | caatggaacaataatcaccactaacatgcttgacagagaggtc |
| | | | | agtgcttggtacaacttgactgtcacagctactgaaacataca |
| | | | | atgtacaacagatctcttcagcccatgtttatgtacaagtctt |
| | | | | taacattaacgacaatgctccagagttctctcaattctatgag |
| | | | | acttatgtttgtgaaaatgctgaatctggtgagatagttcaga |
| | | | | tcatcagtgcaattgatagagatgagtccatagaagatcacca |
| | | | | tttttactttaatcactctctggaagacacaaacaactcaagt |
| | | | | tttatgctaacagacaatcaagataacacagctgtaattctga |
| | | | | gtaatagaactggtttcaatcttaaagaagagcctgtcttcta |
| | | | | catgatcatcttgattgctgataacgggatcccatctctcaca |
| | | | | agcacaaacactctcactatccaagtctgtgactgtggagaca |
| | | | | gtagaaacacagaaacttgtgctaacaagggacttctctttat |
| | | | | catgggattcagaacagaggcaataattgccatcatgatatgt |
| | | | | gttatggtaatatttgggtttttctttttgattcttgctctga |
| | | | | aacagcgaagaaaggagactctatttccagagaagactgaaga |
| | | | | ctttagggagaatatattttgctatgatgatgaaggcggcggg |
| | | | | gaagaagactcggaagcctttgacatcgtagagctgagacaaa |
| | | | | gtacagtaatgagagaaagaaagcctcagagaagcaagagtgc |
| | | | | ggagatcaggagcttgtacaggcagtccctgcaggtgggccca |
| | | | | gacagtgccatatttcgaaaatttatcctagagaagcttgaag |
| | | | | aagccaacacagacccatgtgctcccccctttgattcactaca |
| | | | | gacgtttgcctatgagggaacagggtcatcagctggctctctg |
| | | | | agctccttggcatccagagacactgatcaggaggatgacttcg |
| | | | | actaccttaatgacctgggacctcgttttaaaagattagcaag |
| | | | | catgtttggctctgcagtacaacccaacaattag |
| 962 | C137917 | artificial | aa | AWVWRPFVVLEEMDDIQCVGKLRSDLDNGNNSFQYKLLGIGAG |
| | muCDH19 | | | SFSINERTGEICAIQKLDREEKSLYILRAQVIDTTIGKAVETE |
| | (44-362) | | | SEFVIRVLDINDNEPRFLDEPYEAIVPEMSPEGTFVIKVTAND |
| | huCDH19 | | | ADDPSTGYHARILYNLERGQPYFSVEPTTGVIRISSKMDRELQ |
| | (365-772) | | | DTYCVIIQAKDMLGQPGALSGTTTVSIKLSDINDNKPIFKESF |
| | | | | YRFTISESAPIGTSIGKIMAYDDDIGENAEMEYSIEDDDSKIF |
| | | | | DIIIDNDTQEGIVILKKKVDFEQQSYYGIRAKVKNCHVDEELA |
| | | | | PAHVNASTTYIKVQVEDEDEPPLFLLPYYVFEVFEETPQGSFV |
| | | | | GVVSATDPDNRKSPIRYSITRSKVFNINDNGTITTSNSLDREI |
| | | | | SAWYNLSITATEKYNIEQISSIPLYVQVLNINDHAPEFSQYYE |
| | | | | TYVCENAGSGQVIQTISAVDRDESIEEHHFYFNLSVEDTNNSS |
| | | | | FTIIDNQDNTAVILTNRTGFNLQEEPVFYISILIADNGIPSLT |
| | | | | STNTLTIHVCDCGDSGSTQTCQYQELVLSMGFKTEVIIAILIC |
| | | | | IMIIFGFIFLTLGLKQRRKQILFPEKSEDFRENIFQYDDEGGG |
| | | | | EEDTEAFDIAELRSSTIMRERKTRKTTSAEIRSLYRQSLQVGP |
| | | | | DSAIFRKFILEKLEEANTDPCAPPFDSLQTYAFEGTGSLAGSL |
| | | | | SSLESAVSDQDESYDYLNELGPRFKRLACMFGSAVQSNN |
| 963 | C137917 | artificial | nt | gcctgggtgtggagaccatttgttgttctagaagaaatggatg |
| | muCDH19 | | | atatacaatgtgttggaaagctaagatctgacttagacaatgg |
| | (44-362) | | | aaacaactctttccagtacaagctactggggattggcgctgga |
| | huCDH19 | | | agctttagcattaatgaaagaacaggtgaaatatgtgccatac |
| | (365-772) | | | agaagcttgatagagaggaaaaatccctctacattctgagagc |
| | | | | ccaggtaatagacaccactattgggaaggctgtggaaactgaa |
| | | | | tccgagtttgtcatcagagttttggatatcaatgacaatgaac |
| | | | | ccagattcctagatgaaccatatgaggccattgtacctgagat |
| | | | | gtctccagaaggaacatttgtcatcaaggtgacagccaatgac |
| | | | | gcagatgatccttcaactggctatcatgctcgcatcctataca |
| | | | | acttagaacgaggtcaaccatacttttctgttgagccaacaac |
| | | | | aggagtcataaggatatcttctaagatggatagagagttgcaa |
| | | | | gatacatactgtgtaattattcaagccaaggacatgctcggtc |
| | | | | agcctggagccttgtctggaacaacaaccgtatcaattaagct |
| | | | | gtcagatattaatgacaacaagccaatattcaaagaaagtttc |
| | | | | taccgcttcactatatctgaatctgcacccattggaacatcaa |
| | | | | tagggaaaattatggcatatgatgatgacataggggagaatgc |
| | | | | agagatggagtacagcattgaagatgatgattcaaaaatattt |
| | | | | gacataatcattgacaatgacacccaagaagggatagttatac |
| | | | | ttaaaaagaaagttgattttgagcagcagagctattatggcat |
| | | | | tagagctaaggttaaaaactgccatgtggatgaagagcttgca |
| | | | | cctgcccatgttaacgcttccacaacctacattaaagttcaag |
| | | | | tagaagatgaagatgagcctcctcttttcctccttccatatta |
| | | | | tgtatttgaagtttttgaagaaaccccacagggatcatttgta |
| | | | | ggcgtggtgtctgccacagacccagacaataggaaatctccta |
| | | | | tcaggtattctattactaggagcaaagtgttcaatatcaatga |
| | | | | taatggtacaatcactacaagtaactcactggatcgtgaaatc |
| | | | | agtgcttggtacaacctaagtattacagccacagaaaaataca |
| | | | | atatagaacagatctcttcgatcccactgtatgtgcaagttct |
| | | | | taacatcaatgatcatgctcctgagttctctcaatactatgag |
| | | | | acttatgtttgtgaaaatgcaggctctggtcaggtaattcaga |
| | | | | ctatcagtgcagtggatagagatgaatccatagaagagcacca |
| | | | | tttttactttaatctatctgtagaagacactaacaattcaagt |
| | | | | tttacaatcatagataatcaagataacacagctgtcattttga |
| | | | | ctaatagaactggttttaaccttcaagaagaacctgtcttcta |
| | | | | catctccatcttaattgccgacaatggaatcccgtcacttaca |
| | | | | agtacaaacacccttaccatccatgtctgtgactgtggtgaca |
| | | | | gtgggagcacacagacctgccagtaccaggagcttgtgctttc |
| | | | | catgggattcaagacagaagtcatcattgctattctcatttgc |
| | | | | attatgatcatatttgggtttatttttttgactttgggtttaa |
| | | | | aacaacggagaaaacagattctatttcctgagaaaagtgaaga |
| | | | | tttcagagagaatatattccaatatgatgatgaagggggtgga |
| | | | | gaagaagatacagaggcctttgatatagcagagctgaggagta |
| | | | | gtaccataatgcgggaacgcaagactcggaaaaccacaagcgc |
| | | | | tgagatcaggagcctatacaggcagtctttgcaagttggcccc |
| | | | | gacagtgccatattcaggaaattcattctggaaaagctcgaag |
| | | | | aagctaatactgatccgtgtgcccctccttttgattccctcca |
| | | | | gacctacgcttttgagggaacagggtcattagctggatccctg |
| | | | | agctccttagaatcagcagtctctgatcaggatgaaagctatg |
| | | | | attaccttaatgagttgggacctcgctttaaaagattagcatg |
| | | | | catgtttggttctgcagtgcagtcaaataattag |
| 964 | C137915 | artificial | aa | AWVWRPFVVLEEMDDIQCVGKLRSDLDNGNNSFQYKLLGIGAG |
| | muCDH19 | | | SFSINERTGEICAIQKLDREEKSLYILRAQVIDTTIGKAVETE |
| | (44-461) | | | SEFVIRVLDINDNEPRFLDEPYEAIVPEMSPEGTFVIKVTAND |
| | huCDH19 | | | ADDPSTGYHARILYNLERGQPYFSVEPTTGVIRISSKMDRELQ |
| | (464-772) | | | DTYCVIIQAKDMLGQPGALSGTTTVSIKLSDINDNKPIFKESF |
| | | | | YRFTISESAPIGTSIGKIMAYDDDIGENAEMEYSIEDDDSKIF |
| | | | | DIIIDNDTQEGIVILKKKVDFEQQSYYGIRAKVKNCHVDEELA |
| | | | | PAHVNASTTYIKVQVEDEDEPPVFLLPYYILEIPEGKPYGTIV |
| | | | | GTVSATDPDRRQSPMRYYLTGSKMFDINDNGTIITTNMLDREV |
| | | | | SAWYNLTVTATETYNVQQISSAHVYVQVFNINDHAPEFSQYYE |
| | | | | TYVCENAGSGQVIQTISAVDRDESIEEHHFYFNLSVEDTNNSS |
| | | | | FTIIDNQDNTAVILTNRTGFNLQEEPVFYISILIADNGIPSLT |
| | | | | STNTLTIHVCDCGDSGSTQTCQYQELVLSMGFKTEVIIAILIC |
| | | | | IMIIFGFIFLTLGLKQRRKQILFPEKSEDFRENIFQYDDEGGG |
| | | | | EEDTEAFDIAELRSSTIMRERKTRKTTSAEIRSLYRQSLQVGP |
| | | | | DSAIFRKFILEKLEEANTDPCAPPFDSLQTYAFEGTGSLAGSL |
| | | | | SSLESAVSDQDESYDYLNELGPRFKRLACMFGSAVQSNN |
| 965 | C137915 | artificial | nt | gcctgggtgtggagaccatttgttgttctagaagaaatggatg |
| | muCDH19 | | | atatacaatgtgttggaaagctaagatctgacttagacaatgg |
| | (44-461) | | | aaacaactctttccagtacaagctactggggattggcgctgga |
| | huCDH19 | | | agctttagcattaatgaaagaacaggtgaaatatgtgccatac |
| | (464-772) | | | agaagcttgatagagaggaaaaatccctctacattctgagagc |
| | | | | ccaggtaatagacaccactattgggaaggctgtggaaactgaa |
| | | | | tccgagtttgtcatcagagttttggatatcaatgacaatgaac |
| | | | | ccagattcctagatgaaccatatgaggccattgtacctgagat |
| | | | | gtctccagaaggaacatttgtcatcaaggtgacagccaatgac |
| | | | | gcagatgatccttcaactggctatcatgctcgcatcctataca |
| | | | | acttagaacgaggtcaaccatacttttctgttgagccaacaac |
| | | | | aggagtcataaggatatcttctaagatggatagagagttgcaa |
| | | | | gatacatactgtgtaattattcaagccaaggacatgctcggtc |
| | | | | agcctggagccttgtctggaacaacaaccgtatcaattaagct |
| | | | | gtcagatattaatgacaacaagccaatattcaaagaaagtttc |
| | | | | taccgcttcactatatctgaatctgcacccattggaacatcaa |
| | | | | tagggaaaattatggcatatgatgatgacataggggagaatgc |
| | | | | agagatggagtacagcattgaagatgatgattcaaaaatattt |
| | | | | gacataatcattgacaatgacacccaagaagggatagttatac |
| | | | | ttaaaaagaaagttgattttgagcagcagagctattatggcat |
| | | | | tagagctaaggttaaaaactgccatgtggatgaagagcttgca |
| | | | | cctgcccatgttaacgcttccacaacctacattaaagttcaag |
| | | | | tagaagatgaagatgaacctcctgttttcctcttaccatatta |
| | | | | catacttgaaattcctgaaggaaaaccatatggaacaattgtg |
| | | | | gggacggtttctgccacagacccagatcgaagacaatctccta |
| | | | | tgagatattatctcactggaagcaaaatgtttgatatcaatga |
| | | | | caatggaacaataatcaccactaacatgcttgacagagaggtc |
| | | | | agtgcttggtacaacttgactgtcacagctactgaaacataca |
| | | | | atgtacaacagatctcttcagcccatgtttatgtacaagtctt |
| | | | | taacattaatgatcatgctcctgagttctctcaatactatgag |
| | | | | acttatgtttgtgaaaatgcaggctctggtcaggtaattcaga |
| | | | | ctatcagtgcagtggatagagatgaatccatagaagagcacca |
| | | | | tttttactttaatctatctgtagaagacactaacaattcaagt |
| | | | | tttacaatcatagataatcaagataacacagctgtcattttga |
| | | | | ctaatagaactggttttaaccttcaagaagaacctgtcttcta |
| | | | | catctccatcttaattgccgacaatggaatcccgtcacttaca |
| | | | | agtacaaacacccttaccatccatgtctgtgactgtggtgaca |
| | | | | gtgggagcacacagacctgccagtaccaggagcttgtgctttc |
| | | | | catgggattcaagacagaagtcatcattgctattctcatttgc |
| | | | | attatgatcatatttgggtttatttttttgactttgggtttaa |
| | | | | aacaacggagaaaacagattctatttcctgagaaaagtgaaga |
| | | | | tttcagagagaatatattccaatatgatgatgaagggggtgga |
| | | | | gaagaagatacagaggcctttgatatagcagagctgaggagta |
| | | | | gtaccataatgcgggaacgcaagactcggaaaaccacaagcgc |
| | | | | tgagatcaggagcctatacaggcagtctttgcaagttggcccc |
| | | | | gacagtgccatattcaggaaattcattctggaaaagctcgaag |
| | | | | aagctaatactgatccgtgtgcccctccttttgattccctcca |
| | | | | gacctacgcttttgagggaacagggtcattagctggatccctg |
| | | | | agctccttagaatcagcagtctctgatcaggatgaaagctatg |
| | | | | attaccttaatgagttgggacctcgctttaaaagattagcatg |
| | | | | catgtttggttctgcagtgcagtcaaataattag |
| 966 | C71144 | artificial | aa | AWVWRPFVVLEEMDDIQCVGKLRSDLDNGNNSFQYKLLGIGAG |
| | muCDH19 | | | SFSINERTGEICAIQKLDREEKSLYILRAQVIDTTIGKAVETE |
| | (44-770) | | | SEFVIRVLDINDNEPRFLDEPYEAIVPEMSPEGTFVIKVTAND |
| | | | | ADDPSTGYHARILYNLERGQPYFSVEPTTGVIRISSKMDRELQ |
| | | | | DTYCVIIQAKDMLGQPGALSGTTTVSIKLSDINDNKPIFKESF |
| | | | | YRFTISESAPIGTSIGKIMAYDDDIGENAEMEYSIEDDDSKIF |
| | | | | DIIIDNDTQEGIVILKKKVDFEQQSYYGIRAKVKNCHVDEELA |
| | | | | PAHVNASTTYIKVQVEDEDEPPVFLLPYYILEIPEGKPYGTIV |
| | | | | GTVSATDPDRRQSPMRYYLTGSKMFDINDNGTIITTNMLDREV |
| | | | | SAWYNLTVTATETYNVQQISSAHVYVQVFNINDNAPEFSQFYE |
| | | | | TYVCENAESGEIVQIISAIDRDESIEDHHFYFNHSLEDTNNSS |
| | | | | FMLTDNQDNTAVILSNRTGFNLKEEPVFYMIILIADNGIPSLT |
| | | | | STNTLTIQVCDCGDSRNTETCANKGLLFIMGFRTEAIIAIMIC |
| | | | | VMVIFGFFFLILALKQRRKETLFPEKTEDFRENIFCYDDEGGG |
| | | | | EEDSEAFDIVELRQSTVMRERKPQRSKSAEIRSLYRQSLQVGP |
| | | | | DSAIFRKFILEKLEEANTDPCAPPFDSLQTFAYEGTGSSAGSL |
| | | | | SSLASRDTDQEDDFDYLNDLGPRFKRLASMFGSAVQPNN |
| 967 | C71144 | artificial | nt | gcctgggtgtggagaccatttgttgttctagaagaaatggatg |
| | muCDH19 | | | atatacaatgtgttggaaagctaagatctgacttagacaatgg |
| | (44-770) | | | aaacaactctttccagtacaagctactggggattggcgctgga |
| | | | | agctttagcattaatgaaagaacaggtgaaatatgtgccatac |
| | | | | agaagcttgatagagaggaaaaatccctctacattctgagagc |
| | | | | ccaggtaatagacaccactattgggaaggctgtggaaactgaa |
| | | | | tccgagtttgtcatcagagttttggatatcaatgacaatgaac |
| | | | | ccagattcctagatgaaccatatgaggccattgtacctgagat |
| | | | | gtctccagaaggaacatttgtcatcaaggtgacagccaatgac |
| | | | | gcagatgatccttcaactggctatcatgctcgcatcctataca |
| | | | | acttagaacgaggtcaaccatacttttctgttgagccaacaac |
| | | | | aggagtcataaggatatcttctaagatggatagagagttgcaa |
| | | | | gatacatactgtgtaattattcaagccaaggacatgctcggtc |
| | | | | agcctggagccttgtctggaacaacaaccgtatcaattaagct |
| | | | | gtcagatattaatgacaacaagccaatattcaaagaaagtttc |
| | | | | taccgcttcactatatctgaatctgcacccattggaacatcaa |
| | | | | tagggaaaattatggcatatgatgatgacataggggagaatgc |
| | | | | agagatggagtacagcattgaagatgatgattcaaaaatattt |
| | | | | gacataatcattgacaatgacacccaagaagggatagttatac |
| | | | | ttaaaaagaaagttgattttgagcagcagagctattatggcat |
| | | | | tagagctaaggttaaaaactgccatgtggatgaagagcttgca |
| | | | | cctgcccatgttaacgcttccacaacctacattaaagttcaag |
| | | | | tagaagatgaagatgaacctcctgttttcctcttaccatatta |
| | | | | catacttgaaattcctgaaggaaaaccatatggaacaattgtg |
| | | | | gggacggtttctgccacagacccagatcgaagacaatctccta |
| | | | | tgagatattatctcactggaagcaaaatgtttgatatcaatga |
| | | | | caatggaacaataatcaccactaacatgcttgacagagaggtc |
| | | | | agtgcttggtacaacttgactgtcacagctactgaaacataca |
| | | | | atgtacaacagatctcttcagcccatgtttatgtacaagtctt |
| | | | | taacattaacgacaatgctccagagttctctcaattctatgag |
| | | | | acttatgtttgtgaaaatgctgaatctggtgagatagttcaga |
| | | | | tcatcagtgcaattgatagagatgagtccatagaagatcacca |
| | | | | tttttactttaatcactctctggaagacacaaacaactcaagt |
| | | | | tttatgctaacagacaatcaagataacacagctgtaattctga |
| | | | | gtaatagaactggtttcaatcttaaagaagagcctgtcttcta |
| | | | | catgatcatcttgattgctgataacgggatcccatctctcaca |
| | | | | agcacaaacactctcactatccaagtctgtgactgtggagaca |
| | | | | gtagaaacacagaaacttgtgctaacaagggacttctctttat |
| | | | | catgggattcagaacagaggcaataattgccatcatgatatgt |
| | | | | gttatggtaatatttgggtttttctttttgattcttgctctga |
| | | | | aacagcgaagaaaggagactctatttccagagaagactgaaga |
| | | | | ctttagggagaatatattttgctatgatgatgaaggcggcggg |
| | | | | gaagaagactcggaagcctttgacatcgtagagctgagacaaa |
| | | | | gtacagtaatgagagaaagaaagcctcagagaagcaagagtgc |
| | | | | ggagatcaggagcttgtacaggcagtccctgcaggtgggccca |
| | | | | gacagtgccatatttcgaaaatttatcctagagaagcttgaag |
| | | | | aagccaacacagacccatgtgctcccccctttgattcactaca |
| | | | | gacgtttgcctatgagggaacagggtcatcagctggctctctg |
| | | | | agctccttggcatccagagacactgatcaggaggatgacttcg |
| | | | | actaccttaatgacctgggacctcgttttaaaagattagcaag |
| | | | | catgtttggctctgcagtacaacccaacaattag |
| 968 | Flag Tag | artificial | aa | DYKDDDDK |
| 969 | Flag Tag | artificial | nt | gactacaaagacgatgacgacaag |

### Bispecific Binding Molecules

TABLE VI

| SEQ | | | | |
|---|---|---|---|---|
| ID | | | | |
| NO. | DESIGNATION | SOURCE | TYPE | SEQUENCE |
| 970 | CDR-H1 of | artificial | AA | SYGMH |
| | CDH19 2G6 | | | |
| 971 | CDR-H2 of | artificial | AA | FIWYDGSNKYYADSVKD |
| | CDH19 2G6 | | | |
| 972 | CDR-H3 of | artificial | AA | RAGIIGTIGYYYGMDV |
| | CDH19 2G6 | | | |
| 973 | CDR-L1 of | artificial | AA | SGDRLGEKYTC |
| | CDH19 2G6 | | | |
| 974 | CDR-L2 of | artificial | AA | QDTKRPS |
| | CDH19 2G6 | | | |
| 975 | CDR-L3 of | artificial | AA | QAWDSSTVV |
| | CDH19 2G6 | | | |
| 976 | VH of CDH19 | artificial | NT | CAGGTGCAGCTGGTGGAATCCGGCGGAGGCGTGGTGCAGCCTG |
| | 2G6 | | | GCCGGTCCCTGAGACTGTCTTGCGCCGCCTCCGGCTTCACCTT |
| | | | | CTCCAGCTACGGCATGCACTGGGTCCGACAGGCCCCTGGCAAG |
| | | | | GGCCTGGAATGGGTGGCCTTCATTTGGTACGACGGCTCCAACA |
| | | | | AGTACTACGCCGACTCCGTGAAGGACCGGTTCACCATCTCCCG |
| | | | | GGACAACTCCAAGAACACCCTGTACCTGCAGATGAAGTCCCTG |
| | | | | CGGGCCGAGGACACCGCCGTGTACTACTGTGCCAGAAGGGCCG |
| | | | | GCATCATCGGCACCATCGGCTACTACTACGGCATGGACGTGTG |
| | | | | GGGCCAGGGCACCACCGTGACCGTGTCTAGC |
| 977 | VH of CDH19 | artificial | AA | QVQLVESGGGVVQPGRSLRLSCAASGFTFSSYGMHWVRQAPGK |
| | 2G6 | | | GLEWVAFIWYDGSNKYYADSVKDRFTISRDNSKNTLYLQMKSL |
| | | | | RAEDTAVYYCARRAGIIGTIGYYYGMDVWGQGTTVTVSS |
| 978 | VL of CDH19 | artificial | NT | TACGAGCTGACCCAGCCCCCCTCCGTGTCCGTGTCTCCTGGCC |
| | 2G6 | | | AGACCGCCTCCATCACCTGTTCTGGCGACCGGCTGGGCGAGAA |
| | | | | GTACACCTGTTGGTATCAGCAGCGGCCTGGCCAGTCCCCCCTG |
| | | | | CTGGTCATCTACCAGGACACCAAGCGGCCCTCCGGCATCCCTG |
| | | | | AGCGGTTCTCCGGCTCCAACTCCGGCAACACCGCCACCCTGAC |
| | | | | CATCTCCGGCACCCAGGCCATGGACGAGGCCGACTACTACTGC |
| | | | | CAGGCCTGGGACTCCTCCACCGTGGTGTTCGGCGGAGGCACCA |
| | | | | AGCTGACCGTGCTG |
| 979 | VL of CDH19 | artificial | AA | SYELTQPPSVSVSPGQTASITCSGDRLGEKYTCWYQQRPGQSP |
| | 2G6 | | | LLVIYQDTKRPSGIPERFSGSNSGNTATLTISGTQAMDEADYY |
| | | | | CQAWDSSTVVFGGGTKLTVL |
| 980 | VH-VL of | artificial | NT | CAGGTGCAGCTGGTGGAATCCGGCGGAGGCGTGGTGCAGCCTG |
| | CDH19 2G6 | | | GCCGGTCCCTGAGACTGTCTTGCGCCGCCTCCGGCTTCACCTT |
| | | | | CTCCAGCTACGGCATGCACTGGGTCCGACAGGCCCCTGGCAAG |
| | | | | GGCCTGGAATGGGTGGCCTTCATTTGGTACGACGGCTCCAACA |
| | | | | AGTACTACGCCGACTCCGTGAAGGACCGGTTCACCATCTCCCG |
| | | | | GGACAACTCCAAGAACACCCTGTACCTGCAGATGAAGTCCCTG |
| | | | | CGGGCCGAGGACACCGCCGTGTACTACTGTGCCAGAAGGGCCG |
| | | | | GCATCATCGGCACCATCGGCTACTACTACGGCATGGACGTGTG |
| | | | | GGGCCAGGGCACCACCGTGACCGTGTCTAGCGGAGGCGGAGGA |
| | | | | TCTGGTGGCGGTGGTTCTGGCGGCGGAGGCTCCTCTTACGAGC |
| | | | | TGACCCAGCCCCCCTCCGTGTCCGTGTCTCCTGGCCAGACCGC |
| | | | | CTCCATCACCTGTTCTGGCGACCGGCTGGGCGAGAAGTACACC |
| | | | | TGTTGGTATCAGCAGCGGCCTGGCCAGTCCCCCCTGCTGGTCA |
| | | | | TCTACCAGGACACCAAGCGGCCCTCCGGCATCCCTGAGCGGTT |
| | | | | CTCCGGCTCCAACTCCGGCAACACCGCCACCCTGACCATCTCC |
| | | | | GGCACCCAGGCCATGGACGAGGCCGACTACTACTGCCAGGCCT |
| | | | | GGGACTCCTCCACCGTGGTGTTCGGCGGAGGCACCAAGCTGAC |
| | | | | CGTGCTG |
| 981 | VH-VL of | artificial | AA | QVQLVESGGGVVQPGRSLRLSCAASGFTFSSYGMHWVRQAPGK |
| | CDH19 2G6 | | | GLEWVAFIWYDGSNKYYADSVKDRFTISRDNSKNTLYLQMKSL |
| | | | | RAEDTAVYYCARRAGIIGTIGYYYGMDVWGQGTTVTVSSGGGG |
| | | | | SGGGGSGGGGSSYELTQPPSVSVSPGQTASITCSGDRLGEKYT |
| | | | | CWYQQRPGQSPLLVIYQDTKRPSGIPERFSGSNSGNTATLTIS |
| | | | | GTQAMDEADYYCQAWDSSTVVFGGGTKLTVL |
| 982 | CDH19 2G6 x | artificial | | QVQLVESGGGVVQPGRSLRLSCAASGFTFSSYGMHWVRQAPGK |
| | I2C | | | GLEWVAFIWYDGSNKYYADSVKDRFTISRDNSKNTLYLQMKSL |
| | | | | RAEDTAVYYCARRAGIIGTIGYYYGMDVWGQGTTVTVSSGGGG |
| | | | | SGGGGSGGGGSSYELTQPPSVSVSPGQTASITCSGDRLGEKYT |
| | | | | CWYQQRPGQSPLLVIYQDTKRPSGIPERFSGSNSGNTATLTIS |
| | | | | GTQAMDEADYYCQAWDSSTVVFGGGTKLTVLSGGGGSEVQLVE |
| | | | | SGGGLVQPGGSLKLSCAASGFTFNKYAMNWVRQAPGKGLEWVA |
| | | | | RIRSKYNNYATYYADSVKDRFTISRDDSKNTAYLQMNNLKTED |
| | | | | TAVYYCVRHGNFGNSYISYWAYWGQGTLVTVSSGGGGSGGGGS |
| | | | | GGGGSQTVVTQEPSLTVSPGGTVTLTCGSSTGAVTSGNYPNWV |
| | | | | QQKPGQAPRGLIGGTKFLAPGTPARFSGSLLGGKAALTLSGVQ |
| | | | | PEDEAEYYCVLWYSNRWVFGGGTKLTVLHHHHHH |
| 983 | CDR-H1 of | artificial | AA | SYGMH |
| | CDH19 16E2.1 | | | |
| 984 | CDR-H2 of | artificial | AA | VIWYDGSNKYYADSVKG |
| | CDH19 16E2.1 | | | |
| 985 | CDR-H3 of | artificial | AA | DGWELSFDY |
| | CDH19 16E2.1 | | | |
| 986 | CDR-L1 of | artificial | AA | RASQGISNYLA |
| | CDH19 16E2.1 | | | |
| 987 | CDR-L2 of | artificial | AA | AASSLQS |
| | CDH19 16E2.1 | | | |
| 988 | CDR-L3 of | artificial | AA | QHYFTYPRT |
| | CDH19 16E2.1 | | | |
| 989 | VH of CDH19 | artificial | NT | CAGGTGCAGCTGGTGGAATCCGGCGGAGGCGTGGTGCAGCCTG |
| | 16E2.1 | | | GCCGGTCCCTGAGACTGTCTTGCGCCGCCTCCGGCTTCATCTT |
| | | | | CTCCAGCTACGGCATGCACTGGGTCCGACAGACCCCCGGCAAG |
| | | | | GGCCTGGAATGGGTGGCCGTGATTTGGTACGACGGCTCCAACA |
| | | | | AGTACTACGCCGACTCCGTGAAGGGCCGGTTCACCATCTCCCG |
| | | | | GGACATCTCCAAGAACACCCTGTACCTGCAGATGAACTCCCTG |
| | | | | CGGGTGGAAGATACCGCCGTGTACTACTGCGCCAGGGACGGCT |
| | | | | GGGAGCTGTCCTTCGATTACTGGGGCCAGGGCACCCTGGTCAC |
| | | | | CGTGTCTAGC |
| 990 | VH of CDH19 | artificial | AA | QVQLVESGGGVVQPGRSLRLSCAASGFIFSSYGMHWVRQTPGK |
| | 16E2.1 | | | GLEWVAVIWYDGSNKYYADSVKGRFTISRDISKNTLYLQMNSL |
| | | | | RVEDTAVYYCARDGWELSFDYWGQGTLVTVSS |
| 991 | VL of CDH19 | artificial | NT | GACATCCAGATGACCCAGTCCCCCTCCAGCCTGTCCGCCTCCG |
| | 16E2.1 | | | TGGGCGACAGAGTGACCATCACCTGTCGGGCCTCCCAGGGCAT |
| | | | | CAGCAACTACCTGGCCTGGCTGCAGCAGAAGCCCGGCAAGGCC |
| | | | | CCCAAGTCCCTGATCTACGCCGCCAGCTCCCTGCAGTCCGGCG |
| | | | | TGCCCTCCAAGTTCTCCGGCTCTGGCTCCGGCACCGACTTCAC |
| | | | | CCTGACCATCTCCAGCCTGCAGCCCGAGGACTTCGCCACCTAC |
| | | | | TACTGCCAGCACTACTTCACCTACCCCCGGACCTTCGGACAGG |
| | | | | GCACCAAGGTGGAAATCAAG |
| 992 | VL of CDH19 | artificial | AA | DIQMTQSPSSLSASVGDRVTITCRASQGISNYLAWLQQKPGKA |
| | 16E2.1 | | | PKSLIYAASSLQSGVPSKFSGSGSGTDFTLTISSLQPEDFATY |
| | | | | YCQHYFTYPRTFGQGTKVEIK |
| 993 | VH-VL of | artificial | NT | CAGGTGCAGCTGGTGGAATCCGGCGGAGGCGTGGTGCAGCCTG |
| | CDH19 16E2.1 | | | GCCGGTCCCTGAGACTGTCTTGCGCCGCCTCCGGCTTCATCTT |
| | | | | CTCCAGCTACGGCATGCACTGGGTCCGACAGACCCCCGGCAAG |
| | | | | GGCCTGGAATGGGTGGCCGTGATTTGGTACGACGGCTCCAACA |
| | | | | AGTACTACGCCGACTCCGTGAAGGGCCGGTTCACCATCTCCCG |
| | | | | GGACATCTCCAAGAACACCCTGTACCTGCAGATGAACTCCCTG |
| | | | | CGGGTGGAAGATACCGCCGTGTACTACTGCGCCAGGGACGGCT |
| | | | | GGGAGCTGTCCTTCGATTACTGGGGCCAGGGCACCCTGGTCAC |
| | | | | CGTGTCTAGCGGAGGCGGAGGATCTGGTGGCGGTGGTTCTGGC |
| | | | | GGCGGAGGCTCCGACATCCAGATGACCCAGTCCCCCTCCAGCC |
| | | | | TGTCCGCCTCCGTGGGCGACAGAGTGACCATCACCTGTCGGGC |
| | | | | CTCCCAGGGCATCAGCAACTACCTGGCCTGGCTGCAGCAGAAG |
| | | | | CCCGGCAAGGCCCCCAAGTCCCTGATCTACGCCGCCAGCTCCC |
| | | | | TGCAGTCCGGCGTGCCCTCCAAGTTCTCCGGCTCTGGCTCCGG |
| | | | | CACCGACTTCACCCTGACCATCTCCAGCCTGCAGCCCGAGGAC |
| | | | | TTCGCCACCTACTACTGCCAGCACTACTTCACCTACCCCCGGA |
| | | | | CCTTCGGACAGGGCACCAAGGTGGAAATCAAG |
| 994 | VH-VL of | artificial | AA | QVQLVESGGGVVQPGRSLRLSCAASGFIFSSYGMHWVRQTPGK |
| | CDH19 16E2.1 | | | GLEWVAVIWYDGSNKYYADSVKGRFTISRDISKNTLYLQMNSL |
| | | | | RVEDTAVYYCARDGWELSFDYWGQGTLVTVSSGGGGSGGGGSG |
| | | | | GGGSDIQMTQSPSSLSASVGDRVTITCRASQGISNYLAWLQQK |
| | | | | PGKAPKSLIYAASSLQSGVPSKFSGSGSGTDFTLTISSLQPED |
| | | | | FATYYCQHYFTYPRTFGQGTKVEIK |
| 995 | CDH19 16E2.1 | artificial | | QVQLVESGGGVVQPGRSLRLSCAASGFIFSSYGMHWVRQTPGK |
| | x I2C | | | GLEWVAVIWYDGSNKYYADSVKGRFTISRDISKNTLYLQMNSL |
| | | | | RVEDTAVYYCARDGWELSFDYWGQGTLVTVSSGGGGSGGGGSG |
| | | | | GGGSDIQMTQSPSSLSASVGDRVTITCRASQGISNYLAWLQQK |
| | | | | PGKAPKSLIYAASSLQSGVPSKFSGSGSGTDFTLTISSLQPED |
| | | | | FATYYCQHYFTYPRTFGQGTKVEIKSGGGGSEVQLVESGGGLV |
| | | | | QPGGSLKLSCAASGFTFNKYAMNWVRQAPGKGLEWVARIRSKY |
| | | | | NNYATYYADSVKDRFTISRDDSKNTAYLQMNNLKTEDTAVYYC |
| | | | | VRHGNFGNSYISYWAYWGQGTLVTVSSGGGGSGGGGSGGGGSQ |
| | | | | TVVTQEPSLTVSPGGTVTLTCGSSTGAVTSGNYPNWVQQKPGQ |
| | | | | APRGLIGGTKFLAPGTPARFSGSLLGGKAALTLSGVQPEDEAE |
| | | | | YYCVLWYSNRWVFGGGTKLTVLHHHHHH |
| 996 | CDR-H1 of | artificial | AA | SYYWS |
| | CDH19 17H8.2 | | | |
| 997 | CDR-H2 of | artificial | AA | YIYYIGSTNYNPSLKS |
| | CDH19 17H8.2 | | | |
| 998 | CDR-H3 of | artificial | AA | DSRYRSGWYDAFDI |
| | CDH19 17H8.2 | | | |
| 999 | CDR-L1 of | artificial | AA | RASQSVAGSYLA |
| | CDH19 17H8.2 | | | |
| 1000 | CDR-L2 of | artificial | AA | GASSRAT |
| | CDH19 17H8.2 | | | |
| 1001 | CDR-L3 of | artificial | AA | QQYGKSPIT |
| | CDH19 17H8.2 | | | |
| 1002 | VH of CDH19 | artificial | NT | CAGGTGCAGCTGCAGGAATCCGGCCCTGGCCTGGTCAAGCCCT |
| | 17H8.2 | | | CCGAGACACTGTCCCTGACCTGCACCGTGTCCGGCGGCTCCAT |
| | | | | CAACTCCTACTACTGGTCCTGGATCCGGCAGCCCCCTGGCAAG |
| | | | | GGCCTGGAATGGATCGGCTACATCTACTACATCGGCTCCACCA |
| | | | | ACTACAACCCCAGCCTGAAGTCCAGAGTGACCATCTCCGTGGA |
| | | | | CACCTCCAAGAACCAGTTCTCCCTGAAGCTGTCCTCCGTGACC |
| | | | | GCCGCTGACACCGCCCTGTACTACTGCGCCAGAGACTCCCGGT |
| | | | | ACAGATCCGGGTGGTACGACGCCTTCGACATCTGGGGCCAGGG |
| | | | | CACCATGGTCACCGTGTCCTCT |
| 1003 | VH of CDH19 | artificial | AA | QVQLQESGPGLVKPSETLSLTCTVSGGSINSYYWSWIRQPPGK |
| | 17H8.2 | | | GLEWIGYIYYIGSTNYNPSLKSRVTISVDTSKNQFSLKLSSVT |
| | | | | AADTALYYCARDSRYRSGWYDAFDIWGQGTMVTVSS |
| 1004 | VL of CDH19 | artificial | NT | GATATCGTGCTGACCCAGTCCCCCGGCACCCTGTCTCTGAGCC |
| | 17H8.2 | | | CTGGCGAGAGAGCCACCCTGTCCTGCAGAGCCTCTCAGTCCGT |
| | | | | GGCCGGCTCCTACCTGGCTTGGTATCAGCAGAAGCCCGGCCAG |
| | | | | GCCCCTCGGCTGCTGATCTCCGGCGCCTCTTCTAGAGCCACCG |
| | | | | GCATCCCTGACCGGTTCTCCGGCTCTGGCTCCGGCACCGACTT |
| | | | | CACCCTGACCATCAGCCGGCTGGAACCCGAGGACTTCGCCGTG |
| | | | | TACTATTGCCAGCAGTACGGCAAGTCCCCCATCACCTTCGGCC |
| | | | | AGGGAACCCGGCTGGAAATGAAG |
| 1005 | VL of CDH19 | artificial | AA | DIVLTQSPGTLSLSPGERATLSCRASQSVAGSYLAWYQQKPGQ |
| | 17H8.2 | | | APRLLISGASSRATGIPDRFSGSGSGTDFTLTISRLEPEDFAV |
| | | | | YYCQQYGKSPITFGQGTRLEMK |
| 1006 | VH-VL of | artificial | NT | CAGGTGCAGCTGCAGGAATCCGGCCCTGGCCTGGTCAAGCCCT |
| | CDH19 17H8.2 | | | CCGAGACACTGTCCCTGACCTGCACCGTGTCCGGCGGCTCCAT |
| | | | | CAACTCCTACTACTGGTCCTGGATCCGGCAGCCCCCTGGCAAG |
| | | | | GGCCTGGAATGGATCGGCTACATCTACTACATCGGCTCCACCA |
| | | | | ACTACAACCCCAGCCTGAAGTCCAGAGTGACCATCTCCGTGGA |
| | | | | CACCTCCAAGAACCAGTTCTCCCTGAAGCTGTCCTCCGTGACC |
| | | | | GCCGCTGACACCGCCCTGTACTACTGCGCCAGAGACTCCCGGT |
| | | | | ACAGATCCGGGTGGTACGACGCCTTCGACATCTGGGGCCAGGG |
| | | | | CACCATGGTCACCGTGTCCTCTGGTGGCGGAGGCTCTGGCGGA |
| | | | | GGTGGAAGCGGAGGCGGCGGATCCGATATCGTGCTGACCCAGT |
| | | | | CCCCCGGCACCCTGTCTCTGAGCCCTGGCGAGAGAGCCACCCT |
| | | | | GTCCTGCAGAGCCTCTCAGTCCGTGGCCGGCTCCTACCTGGCT |
| | | | | TGGTATCAGCAGAAGCCCGGCCAGGCCCCTCGGCTGCTGATCT |
| | | | | CCGGCGCCTCTTCTAGAGCCACCGGCATCCCTGACCGGTTCTC |
| | | | | CGGCTCTGGCTCCGGCACCGACTTCACCCTGACCATCAGCCGG |
| | | | | CTGGAACCCGAGGACTTCGCCGTGTACTATTGCCAGCAGTACG |
| | | | | GCAAGTCCCCCATCACCTTCGGCCAGGGAACCCGGCTGGAAAT |
| | | | | GAAG |
| 1007 | VH-VL of | artificial | AA | QVQLQESGPGLVKPSETLSLTCTVSGGSINSYYWSWIRQPPGK |
| | CDH19 17H8.2 | | | GLEWIGYIYYIGSTNYNPSLKSRVTISVDTSKNQFSLKLSSVT |
| | | | | AADTALYYCARDSRYRSGWYDAFDIWGQGTMVTVSSGGGGSGG |
| | | | | GGSGGGGSDIVLTQSPGTLSLSPGERATLSCRASQSVAGSYLA |
| | | | | WYQQKPGQAPRLLISGASSRATGIPDRFSGSGSGTDFTLTISR |
| | | | | LEPEDFAVYYCQQYGKSPITFGQGTRLEMK |
| 1008 | CDH19 17H8.2 | artificial | | QVQLQESGPGLVKPSETLSLTCTVSGGSINSYYWSWIRQPPGK |
| | x I2C | | | GLEWIGYIYYIGSTNYNPSLKSRVTISVDTSKNQFSLKLSSVT |
| | | | | AADTALYYCARDSRYRSGWYDAFDIWGQGTMVTVSSGGGGSGG |
| | | | | GGSGGGGSDIVLTQSPGTLSLSPGERATLSCRASQSVAGSYLA |
| | | | | WYQQKPGQAPRLLISGASSRATGIPDRFSGSGSGTDFTLTISR |
| | | | | LEPEDFAVYYCQQYGKSPITFGQGTRLEMKSGGGGSEVQLVES |
| | | | | GGGLVQPGGSLKLSCAASGFTFNKYAMNWVRQAPGKGLEWVAR |
| | | | | IRSKYNNYATYYADSVKDRFTISRDDSKNTAYLQMNNLKTEDT |
| | | | | AVYYCVRHGNFGNSYISYWAYWGQGTLVTVSSGGGGSGGGGSG |
| | | | | GGGSQTVVTQEPSLTVSPGGTVTLTCGSSTGAVTSGNYPNWVQ |
| | | | | QKPGQAPRGLIGGTKFLAPGTPARFSGSLLGGKAALTLSGVQP |
| | | | | EDEAEYYCVLWYSNRWVFGGGTKLTVLHHHHHH |
| 1009 | CDR-H1 of | artificial | AA | SYFIH |
| | CDH19 19B5.1 | | | |
| 1010 | CDR-H2 of | artificial | AA | IINPISVSTSYAQKFQG |
| | CDH19 19B5.1 | | | |
| 1011 | CDR-H3 of | artificial | AA | GGIQLWLHLDY |
| | CDH19 19B5.1 | | | |
| 1012 | CDR-L1 of | artificial | AA | SGSRSNIGSNFVN |
| | CDH19 19B5.1 | | | |
| 1013 | CDR-L2 of | artificial | AA | TNNQRPS |
| | CDH19 19B5.1 | | | |
| 1014 | CDR-L3 of | artificial | AA | ATWDDSMNGWV |
| | CDH19 19B5.1 | | | |
| 1015 | VH of CDH19 | artificial | NT | CAGGTGCAGCTGGTGCAGTCTGGCGCCGAAGTGAAGAAACCTG |
| | 19B5.1 | | | GCGCCTCCGTGAAGGTGTCCTGCAAGGTGTCCGGCTACACCTT |
| | | | | CACCAGCTACTTCATCCACTGGGTCCGACAGGCCCCAGGCCAG |
| | | | | GGCCTGGAATGGATGGGCATCATCAACCCTATCTCCGTGTCCA |
| | | | | CCTCCTACGCCCAGAAATTCCAGGGCAGAGTGACCATGACCCG |
| | | | | GGACACCTCCACCTCCACCGTGTTCATGGAACTGTCCTCCCTG |
| | | | | CGGAGCGAGGACACCGCCGTGTACTACTGCGCCAGAGGCGGCA |
| | | | | TCCAGCTGTGGCTGCACCTGGACTATTGGGGCCAGGGCACCCT |
| | | | | GGTCACCGTGTCCTCT |
| 1016 | VH of CDH19 | artificial | AA | QVQLVQSGAEVKKPGASVKVSCKVSGYTFTSYFIHWVRQAPGQ |
| | 19B5.1 | | | GLEWMGIINPISVSTSYAQKFQGRVTMTRDTSTSTVFMELSSL |
| | | | | RSEDTAVYYCARGGIQLWLHLDYWGQGTLVTVSS |
| 1017 | VL of CDH19 | artificial | NT | CAGTCTGCCCTGACCCAGCCTCCCTCCACCACCGGCACACCTG |
| | 19B5.1 | | | GCCAGCGCGTGACCATCTCCTGCTCCGGCTCCCGGTCCAACAT |
| | | | | CGGCTCCAACTTCGTGAACTGGTACAAGCAGCTGCCCGGCACC |
| | | | | GCCCCCAAGGTGCTGATCTACACCAACAACCAGCGGCCCTCCG |
| | | | | GCGTGCCCGACCGGTTCTCTGGCTCCAAGTCTGGCACCTCCGC |
| | | | | CTCCCTGGCCATCTCCGGCCTGCAGTCCGAGGACGAGTCCGAC |
| | | | | TACTACTGTGCCACCTGGGACGACTCCATGAACGGCTGGGTGT |
| | | | | TCGGCGGAGGCACCAAGCTGACCGTGCTG |
| 1018 | VL of CDH19 | artificial | AA | QSALTQPPSTTGTPGQRVTISCSGSRSNIGSNFVNWYKQLPGT |
| | 19B5.1 | | | APKVLIYTNNQRPSGVPDRFSGSKSGTSASLAISGLQSEDESD |
| | | | | YYCATWDDSMNGWVFGGGTKLTVL |
| 1019 | VH-VL of | artificial | NT | CAGGTGCAGCTGGTGCAGTCTGGCGCCGAAGTGAAGAAACCTG |
| | CDH19 19B5.1 | | | GCGCCTCCGTGAAGGTGTCCTGCAAGGTGTCCGGCTACACCTT |
| | | | | CACCAGCTACTTCATCCACTGGGTCCGACAGGCCCCAGGCCAG |
| | | | | GGCCTGGAATGGATGGGCATCATCAACCCTATCTCCGTGTCCA |
| | | | | CCTCCTACGCCCAGAAATTCCAGGGCAGAGTGACCATGACCCG |
| | | | | GGACACCTCCACCTCCACCGTGTTCATGGAACTGTCCTCCCTG |
| | | | | CGGAGCGAGGACACCGCCGTGTACTACTGCGCCAGAGGCGGCA |
| | | | | TCCAGCTGTGGCTGCACCTGGACTATTGGGGCCAGGGCACCCT |
| | | | | GGTCACCGTGTCCTCTGGTGGCGGAGGATCTGGCGGAGGTGGA |
| | | | | AGCGGAGGCGGCGGATCTCAGTCTGCCCTGACCCAGCCTCCCT |
| | | | | CCACCACCGGCACACCTGGCCAGCGCGTGACCATCTCCTGCTC |
| | | | | CGGCTCCCGGTCCAACATCGGCTCCAACTTCGTGAACTGGTAC |
| | | | | AAGCAGCTGCCCGGCACCGCCCCCAAGGTGCTGATCTACACCA |
| | | | | ACAACCAGCGGCCCTCCGGCGTGCCCGACCGGTTCTCTGGCTC |
| | | | | CAAGTCTGGCACCTCCGCCTCCCTGGCCATCTCCGGCCTGCAG |
| | | | | TCCGAGGACGAGTCCGACTACTACTGTGCCACCTGGGACGACT |
| | | | | CCATGAACGGCTGGGTGTTCGGCGGAGGCACCAAGCTGACCGT |
| | | | | GCTG |
| 1020 | VH-VL of | artificial | AA | QVQLVQSGAEVKKPGASVKVSCKVSGYTFTSYFIHWVRQAPGQ |
| | CDH19 19B5.1 | | | GLEWMGIINPISVSTSYAQKFQGRVTMTRDTSTSTVFMELSSL |
| | | | | RSEDTAVYYCARGGIQLWLHLDYWGQGTLVTVSSGGGGSGGGG |
| | | | | SGGGGSQSALTQPPSTTGTPGQRVTISCSGSRSNIGSNFVNWY |
| | | | | KQLPGTAPKVLIYTNNQRPSGVPDRFSGSKSGTSASLAISGLQ |
| | | | | SEDESDYYCATWDDSMNGWVFGGGTKLTVL |
| 1021 | CDH19 19B5.1 | artificial | | QVQLVQSGAEVKKPGASVKVSCKVSGYTFTSYFIHWVRQAPGQ |
| | x I2C | | | GLEWMGIINPISVSTSYAQKFQGRVTMTRDTSTSTVFMELSSL |
| | | | | RSEDTAVYYCARGGIQLWLHLDYWGQGTLVTVSSGGGGSGGGG |
| | | | | SGGGGSQSALTQPPSTTGTPGQRVTISCSGSRSNIGSNFVNWY |
| | | | | KQLPGTAPKVLIYTNNQRPSGVPDRFSGSKSGTSASLAISGLQ |
| | | | | SEDESDYYCATWDDSMNGWVFGGGTKLTVLSGGGGSEVQLVES |
| | | | | GGGLVQPGGSLKLSCAASGFTFNKYAMNWVRQAPGKGLEWVAR |
| | | | | IRSKYNNYATYYADSVKDRFTISRDDSKNTAYLQMNNLKTEDT |
| | | | | AVYYCVRHGNFGNSYISYWAYWGQGTLVTVSSGGGGSGGGGSG |
| | | | | GGGSQTVVTQEPSLTVSPGGTVTLTCGSSTGAVTSGNYPNWVQ |
| | | | | QKPGQAPRGLIGGTKFLAPGTPARFSGSLLGGKAALTLSGVQP |
| | | | | EDEAEYYCVLWYSNRWVFGGGTKLTVLHHHHHH |
| 1022 | CDR-H1 of | artificial | AA | SYFIH |
| | CDH19 20D3.1 | | | |
| 1023 | CDR-H2 of | artificial | AA | IINPISVSTSYAQKFQG |
| | CDH19 20D3.1 | | | |
| 1024 | CDR-H3 of | artificial | AA | GGIQLWLHFDY |
| | CDH19 20D3.1 | | | |
| 1025 | CDR-L1 of | artificial | AA | SGSSSNIGSNFVN |
| | CDH19 20D3.1 | | | |
| 1026 | CDR-L2 of | artificial | AA | TNNQRPS |
| | CDH19 20D3.1 | | | |
| 1027 | CDR-L3 of | artificial | AA | ATWDDSLNGWV |
| | CDH19 20D3.1 | | | |
| 1028 | VH of CDH19 | artificial | NT | CAGGTGCAGCTGGTGCAGTCTGGCGCCGAAGTGAAGAAACCTG |
| | 20D3.1 | | | GCGCCTCCGTGAAGGTGTCCTGCAAGGTGTCCGGCTACACCTT |
| | | | | CACCAGCTACTTCATCCACTGGGTCCGACAGGCCCCAGGCCAG |
| | | | | GGCCTGGAATGGATGGGCATCATCAACCCTATCTCCGTGTCCA |
| | | | | CCTCCTACGCCCAGAAATTCCAGGGCAGAGTGACCATGACCCG |
| | | | | GGACACCTCCACCTCCACCGTGTTCATGGAACTGTCCTCCCTG |
| | | | | CGGAGCGAGGACACCGCCGTGTACTACTGCGCCAGAGGCGGCA |
| | | | | TCCAGCTGTGGCTGCACTTCGACTACTGGGGCCAGGGCACCCT |
| | | | | GGTCACCGTGTCTAGC |
| 1029 | VH of CDH19 | artificial | AA | QVQLVQSGAEVKKPGASVKVSCKVSGYTFTSYFIHWVRQAPGQ |
| | 20D3.1 | | | GLEWMGIINPISVSTSYAQKFQGRVTMTRDTSTSTVFMELSSL |
| | | | | RSEDTAVYYCARGGIQLWLHFDYWGQGTLVTVSS |
| 1030 | VL of CDH19 | artificial | NT | CAGTCTGCCCTGACCCAGCCTCCTTCTGCCACCGGCACCCCTG |
| | 20D3.1 | | | GCCAGCGCGTGACCATCTCCTGCTCCGGCTCCTCCTCCAACAT |
| | | | | CGGCTCCAACTTCGTGAACTGGTACAAGCAGCTGCCCGGCACC |
| | | | | GCCCCCAAGGTGCTGATCTACACCAACAACCAGCGGCCCTCCG |
| | | | | GCGTGCCCGACCGGTTCTCTGGCTCCAAGTCTGGCACCTCCGC |
| | | | | CTCCCTGGCCATCTCCGGCCTGCAGTCCGAGGACGAGTCCGAC |
| | | | | TACTACTGTGCCACCTGGGACGACTCCCTGAACGGCTGGGTGT |
| | | | | TCGGCGGAGGCACCAAGCTGACCGTGCTG |
| 1031 | VL of CDH19 | artificial | AA | QSALTQPPSATGTPGQRVTISCSGSSSNIGSNFVNWYKQLPGT |
| | 20D3.1 | | | APKVLIYTNNQRPSGVPDRFSGSKSGTSASLAISGLQSEDESD |
| | | | | YYCATWDDSLNGWVFGGGTKLTVL |
| 1032 | VH-VL of | artificial | NT | CAGGTGCAGCTGGTGCAGTCTGGCGCCGAAGTGAAGAAACCTG |
| | CDH19 20D3.1 | | | GCGCCTCCGTGAAGGTGTCCTGCAAGGTGTCCGGCTACACCTT |
| | | | | CACCAGCTACTTCATCCACTGGGTCCGACAGGCCCCAGGCCAG |
| | | | | GGCCTGGAATGGATGGGCATCATCAACCCTATCTCCGTGTCCA |
| | | | | CCTCCTACGCCCAGAAATTCCAGGGCAGAGTGACCATGACCCG |
| | | | | GGACACCTCCACCTCCACCGTGTTCATGGAACTGTCCTCCCTG |
| | | | | CGGAGCGAGGACACCGCCGTGTACTACTGCGCCAGAGGCGGCA |
| | | | | TCCAGCTGTGGCTGCACTTCGACTACTGGGGCCAGGGCACCCT |
| | | | | GGTCACCGTGTCTAGCGGAGGCGGAGGATCTGGTGGCGGTGGT |
| | | | | TCTGGCGGCGGAGGCTCTCAGTCTGCCCTGACCCAGCCTCCTT |
| | | | | CTGCCACCGGCACCCCTGGCCAGCGCGTGACCATCTCCTGCTC |
| | | | | CGGCTCCTCCTCCAACATCGGCTCCAACTTCGTGAACTGGTAC |
| | | | | AAGCAGCTGCCCGGCACCGCCCCCAAGGTGCTGATCTACACCA |
| | | | | ACAACCAGCGGCCCTCCGGCGTGCCCGACCGGTTCTCTGGCTC |
| | | | | CAAGTCTGGCACCTCCGCCTCCCTGGCCATCTCCGGCCTGCAG |
| | | | | TCCGAGGACGAGTCCGACTACTACTGTGCCACCTGGGACGACT |
| | | | | CCCTGAACGGCTGGGTGTTCGGCGGAGGCACCAAGCTGACCGT |
| | | | | GCTG |
| 1033 | VH-VL of | artificial | AA | QVQLVQSGAEVKKPGASVKVSCKVSGYTFTSYFIHWVRQAPGQ |
| | CDH19 20D3.1 | | | GLEWMGIINPISVSTSYAQKFQGRVTMTRDTSTSTVFMELSSL |
| | | | | RSEDTAVYYCARGGIQLWLHFDYWGQGTLVTVSSGGGGSGGGG |
| | | | | SGGGGSQSALTQPPSATGTPGQRVTISCSGSSSNIGSNFVNWY |
| | | | | KQLPGTAPKVLIYTNNQRPSGVPDRFSGSKSGTSASLAISGLQ |
| | | | | SEDESDYYCATWDDSLNGWVFGGGTKLTVL |
| 1034 | CDH19 20D3.1 | artificial | | QVQLVQSGAEVKKPGASVKVSCKVSGYTFTSYFIHWVRQAPGQ |
| | x I2C | | | GLEWMGIINPISVSTSYAQKFQGRVTMTRDTSTSTVFMELSSL |
| | | | | RSEDTAVYYCARGGIQLWLHFDYWGQGTLVTVSSGGGGSGGGG |
| | | | | SGGGGSQSALTQPPSATGTPGQRVTISCSGSSSNIGSNFVNWY |
| | | | | KQLPGTAPKVLIYTNNQRPSGVPDRFSGSKSGTSASLAISGLQ |
| | | | | SEDESDYYCATWDDSLNGWVFGGGTKLTVLSGGGGSEVQLVES |
| | | | | GGGLVQPGGSLKLSCAASGFTFNKYAMNWVRQAPGKGLEWVAR |
| | | | | IRSKYNNYATYYADSVKDRFTISRDDSKNTAYLQMNNLKTEDT |
| | | | | AVYYCVRHGNFGNSYISYWAYWGQGTLVTVSSGGGGSGGGGSG |
| | | | | GGGSQTVVTQEPSLTVSPGGTVTLTCGSSTGAVTSGNYPNWVQ |
| | | | | QKPGQAPRGLIGGTKFLAPGTPARFSGSLLGGKAALTLSGVQP |
| | | | | EDEAEYYCVLWYSNRWVFGGGTKLTVLHHHHHH |
| 1035 | CDR-H1 of | artificial | AA | SYFIH |
| | CDH19 22D1.1 | | | |
| 1036 | CDR-H2 of | artificial | AA | IINPISVSTSYAQKFQG |
| | CDH19 22D1.1 | | | |
| 1037 | CDR-H3 of | artificial | AA | GGIQLWLHLDY |
| | CDH19 22D1.1 | | | |
| 1038 | CDR-L1 of | artificial | AA | SGSSSNIGSNFVN |
| | CDH19 22D1.1 | | | |
| 1039 | CDR-L2 of | artificial | AA | TNNQRPS |
| | CDH19 22D1.1 | | | |
| 1040 | CDR-L3 of | artificial | AA | ATWDDSMNGWV |
| | CDH19 22D1.1 | | | |
| 1041 | VH of CDH19 | artificial | NT | CAGGTGCAGCTGGTGCAGTCTGGCGCCGAAGTGAAGAAACCTG |
| | 22D1.1 | | | GCGCCTCCGTGCGGGTGTCCTGCAAGGTGTCCGGCTACACCTT |
| | | | | CACCAGCTACTTCATCCACTGGGTCCGACAGGCCCCAGGCCAG |
| | | | | GGCCTGGAATGGATGGGCATCATCAACCCTATCTCCGTGTCCA |
| | | | | CCTCCTACGCCCAGAAATTCCAGGGCAGAGTGACCATGACCCG |
| | | | | GGACACCTCCACCTCCACCGTGTTCATGGAACTGTCCTCCCTG |
| | | | | CGGAGCGAGGACACCGCCGTGTACTACTGCGCCAGAGGCGGCA |
| | | | | TCCAGCTGTGGCTGCACCTGGACTATTGGGGCCAGGGCACCCT |
| | | | | GGTCACCGTGTCCTCT |
| 1042 | VH of CDH19 | artificial | AA | QVQLVQSGAEVKKPGASVRVSCKVSGYTFTSYFIHWVRQAPGQ |
| | 22D1.1 | | | GLEWMGIINPISVSTSYAQKFQGRVTMTRDTSTSTVFMELSSL |
| | | | | RSEDTAVYYCARGGIQLWLHLDYWGQGTLVTVSS |
| 1043 | VL of CDH19 | artificial | NT | CAGTCTGCCCTGACCCAGCCTCCTTCCGCTACCGGCACCCCTG |
| | 22D1.1 | | | GCCAGCGCGTGACCATCTCCTGCTCCGGCTCCTCCTCCAACAT |
| | | | | CGGCTCCAACTTCGTGAACTGGTACAAGCAGCTGCCCGGCACC |
| | | | | GCCCCCAAGGTGCTGATCTACACCAACAACCAGCGGCCCTCCG |
| | | | | GCGTGCCCGACCGGTTCTCTGGCTCCAAGTCTGGCACCTCCGC |
| | | | | CTCCCTGGCCATCTCCGGCCTGCAGTCCGAGGACGAGTCCGAC |
| | | | | TACTACTGTGCCACCTGGGACGACTCCATGAACGGCTGGGTGT |
| | | | | TCGGCGGAGGCACCAAGCTGACCGTGCTG |
| 1044 | VL of CDH19 | artificial | AA | QSALTQPPSATGTPGQRVTISCSGSSSNIGSNFVNWYKQLPGT |
| | 22D1.1 | | | APKVLIYTNNQRPSGVPDRFSGSKSGTSASLAISGLQSEDESD |
| | | | | YYCATWDDSMNGWVFGGGTKLTVL |
| 1045 | VH-VL of | artificial | NT | CAGGTGCAGCTGGTGCAGTCTGGCGCCGAAGTGAAGAAACCTG |
| | CDH19 22D1.1 | | | GCGCCTCCGTGCGGGTGTCCTGCAAGGTGTCCGGCTACACCTT |
| | | | | CACCAGCTACTTCATCCACTGGGTCCGACAGGCCCCAGGCCAG |
| | | | | GGCCTGGAATGGATGGGCATCATCAACCCTATCTCCGTGTCCA |
| | | | | CCTCCTACGCCCAGAAATTCCAGGGCAGAGTGACCATGACCCG |
| | | | | GGACACCTCCACCTCCACCGTGTTCATGGAACTGTCCTCCCTG |
| | | | | CGGAGCGAGGACACCGCCGTGTACTACTGCGCCAGAGGCGGCA |
| | | | | TCCAGCTGTGGCTGCACCTGGACTATTGGGGCCAGGGCACCCT |
| | | | | GGTCACCGTGTCCTCTGGTGGCGGAGGATCTGGCGGAGGTGGA |
| | | | | AGCGGAGGCGGCGGATCTCAGTCTGCCCTGACCCAGCCTCCTT |
| | | | | CCGCTACCGGCACCCCTGGCCAGCGCGTGACCATCTCCTGCTC |
| | | | | CGGCTCCTCCTCCAACATCGGCTCCAACTTCGTGAACTGGTAC |
| | | | | AAGCAGCTGCCCGGCACCGCCCCCAAGGTGCTGATCTACACCA |
| | | | | ACAACCAGCGGCCCTCCGGCGTGCCCGACCGGTTCTCTGGCTC |
| | | | | CAAGTCTGGCACCTCCGCCTCCCTGGCCATCTCCGGCCTGCAG |
| | | | | TCCGAGGACGAGTCCGACTACTACTGTGCCACCTGGGACGACT |
| | | | | CCATGAACGGCTGGGTGTTCGGCGGAGGCACCAAGCTGACCGT |
| | | | | GCTG |
| 1046 | VH-VL of | artificial | AA | QVQLVQSGAEVKKPGASVRVSCKVSGYTFTSYFIHWVRQAPGQ |
| | CDH19 22D1.1 | | | GLEWMGIINPISVSTSYAQKFQGRVTMTRDTSTSTVFMELSSL |
| | | | | RSEDTAVYYCARGGIQLWLHLDYWGQGTLVTVSSGGGGSGGGG |
| | | | | SGGGGSQSALTQPPSATGTPGQRVTISCSGSSSNIGSNFVNWY |
| | | | | KQLPGTAPKVLIYTNNQRPSGVPDRFSGSKSGTSASLAISGLQ |
| | | | | SEDESDYYCATWDDSMNGWVFGGGTKLTVL |
| 1047 | CDH19 22D1.1 | artificial | | QVQLVQSGAEVKKPGASVRVSCKVSGYTFTSYFIHWVRQAPGQ |
| | x I2C | | | GLEWMGIINPISVSTSYAQKFQGRVTMTRDTSTSTVFMELSSL |
| | | | | RSEDTAVYYCARGGIQLWLHLDYWGQGTLVTVSSGGGGSGGGG |
| | | | | SGGGGSQSALTQPPSATGTPGQRVTISCSGSSSNIGSNFVNWY |
| | | | | KQLPGTAPKVLIYTNNQRPSGVPDRFSGSKSGTSASLAISGLQ |
| | | | | SEDESDYYCATWDDSMNGWVFGGGTKLTVLSGGGGSEVQLVES |
| | | | | GGGLVQPGGSLKLSCAASGFTFNKYAMNWVRQAPGKGLEWVAR |
| | | | | IRSKYNNYATYYADSVKDRFTISRDDSKNTAYLQMNNLKTEDT |
| | | | | AVYYCVRHGNFGNSYISYWAYWGQGTLVTVSSGGGGSGGGGSG |
| | | | | GGGSQTVVTQEPSLTVSPGGTVTLTCGSSTGAVTSGNYPNWVQ |
| | | | | QKPGQAPRGLIGGTKFLAPGTPARFSGSLLGGKAALTLSGVQP |
| | | | | EDEAEYYCVLWYSNRWVFGGGTKLTVLHHHHHH |
| 1048 | CDR-H1 of | artificial | AA | SYAMN |
| | CDH19 | | | |
| | 22G10.1 | | | |
| 1049 | CDR-H2 of | artificial | AA | TISGGGANTYYADSVKG |
| | CDH19 | | | |
| | 22G10.1 | | | |
| 1050 | CDR-H3 of | artificial | AA | GGMGGYYYGMDV |
| | CDH19 | | | |
| | 22G10.1 | | | |
| 1051 | CDR-L1 of | artificial | AA | RASQSISSNLA |
| | CDH19 | | | |
| | 22G10.1 | | | |
| 1052 | CDR-L2 of | artificial | AA | GAFTRAT |
| | CDH19 | | | |
| | 22G10.1 | | | |
| 1053 | CDR-L3 of | artificial | AA | QQYNYWPLT |
| | CDH19 | | | |
| | 22G10.1 | | | |
| 1054 | VH of CDH19 | artificial | NT | GAGGTGCAGCTGCTGGAATCCGGCGGAGGACTGGTGCAGCCTG |
| | 22G10.1 | | | GCGGCTCCCTGAGACTGTCTTGCGCCGCCTCCGGCTTCACCTT |
| | | | | CTCCAGCTACGCCATGAACTGGGTCCGACAGGCCCCTGGCAAG |
| | | | | GGCCTGGAATGGGTGTCCACCATCAGCGGCGGAGGCGCCAACA |
| | | | | CCTACTACGCCGACTCCGTGAAGGGCCGGTTCACCATCTCCTC |
| | | | | CGACAACTCCAAGTCCACCCTGTACCTGCAGATGAACTCCCTG |
| | | | | AGAGCCGCCGACACCGCCGTGTACCACTGTGCTAAGGGCGGCA |
| | | | | TGGGCGGCTACTACTACGGCATGGATGTGTGGGGCCAGGGCAC |
| | | | | CACCGTGACCGTGTCTAGC |
| 1055 | VH of CDH19 | artificial | AA | EVQLLESGGGLVQPGGSLRLSCAASGFTFSSYAMNWVRQAPGK |
| | 22G10.1 | | | GLEWVSTISGGGANTYYADSVKGRFTISSDNSKSTLYLQMNSL |
| | | | | RAADTAVYHCAKGGMGGYYYGMDVWGQGTTVTVSS |
| 1056 | VL of CDH19 | artificial | NT | GAGATCGTGATGACCCAGTCCCCCGTGACCCTGTCCCTGAGCC |
| | 22G10.1 | | | TGGGCGAGAGAGCCACCCTGTCTTGCCGGGCCTCCCAGTCCAT |
| | | | | CTCCAGCAACCTGGCCTGGTTCCAGCAGAAGCCCGGCCAGGCC |
| | | | | CCTCGGCTGCTGATCTACGGCGCCTTTACCCGGGCCACCGGCA |
| | | | | TCCCTGCCAGAGTGTCTGGCTCCGGCTCCGGCACCGAGTTCAC |
| | | | | CCTGACCATCAGCTCCCTGCAGTCCGAGGACTTTGCCGTGTAC |
| | | | | TACTGCCAGCAGTACAACTACTGGCCCCTGACCTTCGGAGGCG |
| | | | | GCACCAAGGTGGAAATCAAG |
| 1057 | VL of CDH19 | artificial | AA | EIVMTQSPVTLSLSLGERATLSCRASQSISSNLAWFQQKPGQA |
| | 22G10.1 | | | PRLLIYGAFTRATGIPARVSGSGSGTEFTLTISSLQSEDFAVY |
| | | | | YCQQYNYWPLTFGGGTKVEIK |
| 1058 | VH-VL of | artificial | NT | GAGGTGCAGCTGCTGGAATCCGGCGGAGGACTGGTGCAGCCTG |
| | CDH19 | | | GCGGCTCCCTGAGACTGTCTTGCGCCGCCTCCGGCTTCACCTT |
| | 22G10.1 | | | CTCCAGCTACGCCATGAACTGGGTCCGACAGGCCCCTGGCAAG |
| | | | | GGCCTGGAATGGGTGTCCACCATCAGCGGCGGAGGCGCCAACA |
| | | | | CCTACTACGCCGACTCCGTGAAGGGCCGGTTCACCATCTCCTC |
| | | | | CGACAACTCCAAGTCCACCCTGTACCTGCAGATGAACTCCCTG |
| | | | | AGAGCCGCCGACACCGCCGTGTACCACTGTGCTAAGGGCGGCA |
| | | | | TGGGCGGCTACTACTACGGCATGGATGTGTGGGGCCAGGGCAC |
| | | | | CACCGTGACCGTGTCTAGCGGAGGCGGAGGATCTGGCGGTGGT |
| | | | | GGTTCTGGCGGAGGCGGCTCCGAGATCGTGATGACCCAGTCCC |
| | | | | CCGTGACCCTGTCCCTGAGCCTGGGCGAGAGAGCCACCCTGTC |
| | | | | TTGCCGGGCCTCCCAGTCCATCTCCAGCAACCTGGCCTGGTTC |
| | | | | CAGCAGAAGCCCGGCCAGGCCCCTCGGCTGCTGATCTACGGCG |
| | | | | CCTTTACCCGGGCCACCGGCATCCCTGCCAGAGTGTCTGGCTC |
| | | | | CGGCTCCGGCACCGAGTTCACCCTGACCATCAGCTCCCTGCAG |
| | | | | TCCGAGGACTTTGCCGTGTACTACTGCCAGCAGTACAACTACT |
| | | | | GGCCCCTGACCTTCGGAGGCGGCACCAAGGTGGAAATCAAG |
| 1059 | VH-VL of | artificial | AA | EVQLLESGGGLVQPGGSLRLSCAASGFTFSSYAMNWVRQAPGK |
| | CDH19 | | | GLEWVSTISGGGANTYYADSVKGRFTISSDNSKSTLYLQMNSL |
| | 22G10.1 | | | RAADTAVYHCAKGGMGGYYYGMDVWGQGTTVTVSSGGGGSGGG |
| | | | | GSGGGGSEIVMTQSPVTLSLSLGERATLSCRASQSISSNLAWF |
| | | | | QQKPGQAPRLLIYGAFTRATGIPARVSGSGSGTEFTLTISSLQ |
| | | | | SEDFAVYYCQQYNYWPLTFGGGTKVEIK |
| 1060 | CDH19 | artificial | | EVQLLESGGGLVQPGGSLRLSCAASGFTFSSYAMNWVRQAPGK |
| | 22G10.1 x I2C | | | GLEWVSTISGGGANTYYADSVKGRFTISSDNSKSTLYLQMNSL |
| | | | | RAADTAVYHCAKGGMGGYYYGMDVWGQGTTVTVSSGGGGSGGG |
| | | | | GSGGGGSEIVMTQSPVTLSLSLGERATLSCRASQSISSNLAWF |
| | | | | QQKPGQAPRLLIYGAFTRATGIPARVSGSGSGTEFTLTISSLQ |
| | | | | SEDFAVYYCQQYNYWPLTFGGGTKVEIKSGGGGSEVQLVESGG |
| | | | | GLVQPGGSLKLSCAASGFTFNKYAMNWVRQAPGKGLEWVARIR |
| | | | | SKYNNYATYYADSVKDRFTISRDDSKNTAYLQMNNLKTEDTAV |
| | | | | YYCVRHGNFGNSYISYWAYWGQGTLVTVSSGGGGSGGGGSGGG |
| | | | | GSQTVVTQEPSLTVSPGGTVTLTCGSSTGAVTSGNYPNWVQQK |
| | | | | PGQAPRGLIGGTKFLAPGTPARFSGSLLGGKAALTLSGVQPED |
| | | | | EAEYYCVLWYSNRWVFGGGTKLTVLHHHHHH |
| 1061 | CDR-H1 of | artificial | AA | RYGIH |
| | CDH19 | | | |
| | 23A10.3 | | | |
| 1062 | CDR-H2 of | artificial | AA | VIWYDGSNKYYADSVKG |
| | CDH19 | | | |
| | 23A10.3 | | | |
| 1063 | CDR-H3 of | artificial | AA | RAGIPGTTGYYYGMDV |
| | CDH19 | | | |
| | 23A10.3 | | | |
| 1064 | CDR-L1 of | artificial | AA | SGDRLGEKYVC |
| | CDH19 | | | |
| | 23A10.3 | | | |
| 1065 | CDR-L2 of | artificial | AA | QDNKWPS |
| | CDH19 | | | |
| | 23A10.3 | | | |
| 1066 | CDR-L3 of | artificial | AA | QAWDSSTVV |
| | CDH19 | | | |
| | 23A10.3 | | | |
| 1067 | VH of CDH19 | artificial | NT | CAGGTGCAGCTGGTGGAATCCGGCGGAGGCGTGGTGCAGCCTG |
| | 23A10.3 | | | GCCGGTCCCTGAGACTGTCTTGCGCCGCCTCCGGCTTCACCTT |
| | | | | CTCCAGATACGGCATCCACTGGGTCCGACAGGCCCCTGGCAAG |
| | | | | GGCCTGGAATGGGTGGCCGTGATTTGGTACGACGGCTCCAACA |
| | | | | AGTACTACGCCGACTCCGTGAAGGGCCGGTTCACCATCTCCCG |
| | | | | GGACAACTCCAAGAACACCCTGTACCTGCTGATGAACTCCCTG |
| | | | | CGGGCCGAGGACTCCGCCGTGTACTACTGTGCCAGAAGGGCCG |
| | | | | GCATCCCCGGCACCACCGGCTACTACTACGGCATGGATGTGTG |
| | | | | GGGCCAGGGCACCACCGTGACCGTGTCTAGC |
| 1068 | VH of CDH19 | artificial | AA | QVQLVESGGGVVQPGRSLRLSCAASGFTFSRYGIHWVRQAPGK |
| | 23A10.3 | | | GLEWVAVIWYDGSNKYYADSVKGRFTISRDNSKNTLYLLMNSL |
| | | | | RAEDSAVYYCARRAGIPGTTGYYYGMDVWGQGTTVTVSS |
| 1069 | VL of CDH19 | artificial | NT | TACGAGCTGACCCAGCCCCCCTCCGTGTCCGTGTCTCCTGGCC |
| | 23A10.3 | | | AGACCGCCTCCATCACCTGTTCTGGCGACCGGCTGGGCGAGAA |
| | | | | ATACGTGTGCTGGTATCAGCAGAAGCCCGGCCAGTCCCCCATC |
| | | | | CTGGTCATCTACCAGGACAACAAGTGGCCCTCCGGCATCCCTG |
| | | | | AGCGGTTCTCCGGCTCCAACTCCGGCAACACCGCCACCCTGAC |
| | | | | CATCTCCGGCACCCAGGCCATGGACGAGGCCGACTACTACTGC |
| | | | | CAGGCCTGGGACTCCTCCACCGTGGTGTTCGGCGGAGGCACCA |
| | | | | AGCTGACCGTGCTG |
| 1070 | VL of CDH19 | artificial | AA | SYELTQPPSVSVSPGQTASITCSGDRLGEKYVCWYQQKPGQSP |
| | 23A10.3 | | | ILVIYQDNKWPSGIPERFSGSNSGNTATLTISGTQAMDEADYY |
| | | | | CQAWDSSTVVFGGGTKLTVL |
| 1071 | VH-VL of | artificial | NT | CAGGTGCAGCTGGTGGAATCCGGCGGAGGCGTGGTGCAGCCTG |
| | CDH19 | | | GCCGGTCCCTGAGACTGTCTTGCGCCGCCTCCGGCTTCACCTT |
| | 23A10.3 | | | CTCCAGATACGGCATCCACTGGGTCCGACAGGCCCCTGGCAAG |
| | | | | GGCCTGGAATGGGTGGCCGTGATTTGGTACGACGGCTCCAACA |
| | | | | AGTACTACGCCGACTCCGTGAAGGGCCGGTTCACCATCTCCCG |
| | | | | GGACAACTCCAAGAACACCCTGTACCTGCTGATGAACTCCCTG |
| | | | | CGGGCCGAGGACTCCGCCGTGTACTACTGTGCCAGAAGGGCCG |
| | | | | GCATCCCCGGCACCACCGGCTACTACTACGGCATGGATGTGTG |
| | | | | GGGCCAGGGCACCACCGTGACCGTGTCTAGCGGAGGCGGAGGA |
| | | | | TCTGGTGGCGGTGGTTCTGGCGGCGGAGGCTCCTCTTACGAGC |
| | | | | TGACCCAGCCCCCCTCCGTGTCCGTGTCTCCTGGCCAGACCGC |
| | | | | CTCCATCACCTGTTCTGGCGACCGGCTGGGCGAGAAATACGTG |
| | | | | TGCTGGTATCAGCAGAAGCCCGGCCAGTCCCCCATCCTGGTCA |
| | | | | TCTACCAGGACAACAAGTGGCCCTCCGGCATCCCTGAGCGGTT |
| | | | | CTCCGGCTCCAACTCCGGCAACACCGCCACCCTGACCATCTCC |
| | | | | GGCACCCAGGCCATGGACGAGGCCGACTACTACTGCCAGGCCT |
| | | | | GGGACTCCTCCACCGTGGTGTTCGGCGGAGGCACCAAGCTGAC |
| | | | | CGTGCTG |
| 1072 | VH-VL of | artificial | AA | QVQLVESGGGVVQPGRSLRLSCAASGFTFSRYGIHWVRQAPGK |
| | CDH19 | | | GLEWVAVIWYDGSNKYYADSVKGRFTISRDNSKNTLYLLMNSL |
| | 23A10.3 | | | RAEDSAVYYCARRAGIPGTTGYYYGMDVWGQGTTVTVSSGGGG |
| | | | | SGGGGSGGGGSSYELTQPPSVSVSPGQTASITCSGDRLGEKYV |
| | | | | CWYQQKPGQSPILVIYQDNKWPSGIPERFSGSNSGNTATLTIS |
| | | | | GTQAMDEADYYCQAWDSSTVVFGGGTKLTVL |
| 1073 | CDH19 | artificial | | QVQLVESGGGVVQPGRSLRLSCAASGFTFSRYGIHWVRQAPGK |
| | 23A10.3 x I2C | | | GLEWVAVIWYDGSNKYYADSVKGRFTISRDNSKNTLYLLMNSL |
| | | | | RAEDSAVYYCARRAGIPGTTGYYYGMDVWGQGTTVTVSSGGGG |
| | | | | SGGGGSGGGGSSYELTQPPSVSVSPGQTASITCSGDRLGEKYV |
| | | | | CWYQQKPGQSPILVIYQDNKWPSGIPERFSGSNSGNTATLTIS |
| | | | | GTQAMDEADYYCQAWDSSTVVFGGGTKLTVLSGGGGSEVQLVE |
| | | | | SGGGLVQPGGSLKLSCAASGFTFNKYAMNWVRQAPGKGLEWVA |
| | | | | RIRSKYNNYATYYADSVKDRFTISRDDSKNTAYLQMNNLKTED |
| | | | | TAVYYCVRHGNFGNSYISYWAYWGQGTLVTVSSGGGGSGGGGS |
| | | | | GGGGSQTVVTQEPSLTVSPGGTVTLTCGSSTGAVTSGNYPNWV |
| | | | | QQKPGQAPRGLIGGTKFLAPGTPARFSGSLLGGKAALTLSGVQ |
| | | | | PEDEAEYYCVLWYSNRWVFGGGTKLTVLHHHHHH |
| 1074 | CDR-H1 of | artificial | AA | SYYIH |
| | CDH19 25F8.1 | | | |
| 1075 | CDR-H2 of | artificial | AA | IINPSGGSTRYAQKFQG |
| | CDH19 25F8.1 | | | |
| 1076 | CDR-H3 of | artificial | AA | GGIQLWLHFDY |
| | CDH19 25F8.1 | | | |
| 1077 | CDR-L1 of | artificial | AA | SGSSSNIGRNFVN |
| | CDH19 25F8.1 | | | |
| 1078 | CDR-L2 of | artificial | AA | TNNQRPS |
| | CDH19 25F8.1 | | | |
| 1079 | CDR-L3 of | artificial | AA | AAWDDSLNGWV |
| | CDH19 25F8.1 | | | |
| 1080 | VH of CDH19 | artificial | NT | CAGGTGCAGCTGGTGCAGTCTGGCGCCGAAGTGAAGAAACCTG |
| | 25F8.1 | | | GCGCCTCCGTGAAGGTGTCCTGCAAGGCCTCCGGCTACACCTT |
| | | | | CACCAGCTACTACATCCACTGGGTCCGACAGGCCCCAGGCCAG |
| | | | | GGCCTGGAATGGATGGGCATCATCAACCCCTCCGGCGGCTCCA |
| | | | | CCAGATACGCCCAGAAATTCCAGGGCAGAGTGACCATGACCCG |
| | | | | GGACACCTCCACCTCCACCGTGTTCATGGAACTGTCCTCCCTG |
| | | | | CGGAGCGAGGACACCGCCGTGTACTACTGCGCCAGAGGCGGCA |
| | | | | TCCAGCTGTGGCTGCACTTCGACTACTGGGGCCAGGGCACCCT |
| | | | | GGTCACCGTGTCTAGC |
| 1081 | VH of CDH19 | artificial | AA | QVQLVQSGAEVKKPGASVKVSCKASGYTFTSYYIHWVRQAPGQ |
| | 25F8.1 | | | GLEWMGIINPSGGSTRYAQKFQGRVTMTRDTSTSTVFMELSSL |
| | | | | RSEDTAVYYCARGGIQLWLHFDYWGQGTLVTVSS |
| 1082 | VL of CDH19 | artificial | NT | CAGTCTGCCCTGACCCAGCCTCCTTCTGCCACCGGCACCCCTG |
| | 25F8.1 | | | GCCAGCGCGTGACCATCTCCTGCTCCGGCTCCTCCTCCAACAT |
| | | | | CGGCCGGAACTTCGTGAACTGGTACAAGCAGCTGCCCGGCACC |
| | | | | GCCCCCAAGGTGCTGATCTACACCAACAACCAGCGGCCCTCCG |
| | | | | GCGTGCCCGACCGGTTCTCTGGCTCCAAGTCTGGCACCTCCGC |
| | | | | CTCCCTGGCCATCTCCGGCCTGCAGTCCGAGGACGAGTCCGAC |
| | | | | TACTACTGTGCCGCCTGGGACGACTCCCTGAACGGCTGGGTGT |
| | | | | TCGGCGGAGGCACCAAGCTGACCGTGCTG |
| 1083 | VL of CDH19 | artificial | AA | QSALTQPPSATGTPGQRVTISCSGSSSNIGRNFVNWYKQLPGT |
| | 25F8.1 | | | APKVLIYTNNQRPSGVPDRFSGSKSGTSASLAISGLQSEDESD |
| | | | | YYCAAWDDSLNGWVFGGGTKLTVL |
| 1084 | VH-VL of | artificial | NT | CAGGTGCAGCTGGTGCAGTCTGGCGCCGAAGTGAAGAAACCTG |
| | CDH19 25F8.1 | | | GCGCCTCCGTGAAGGTGTCCTGCAAGGCCTCCGGCTACACCTT |
| | | | | CACCAGCTACTACATCCACTGGGTCCGACAGGCCCCAGGCCAG |
| | | | | GGCCTGGAATGGATGGGCATCATCAACCCCTCCGGCGGCTCCA |
| | | | | CCAGATACGCCCAGAAATTCCAGGGCAGAGTGACCATGACCCG |
| | | | | GGACACCTCCACCTCCACCGTGTTCATGGAACTGTCCTCCCTG |
| | | | | CGGAGCGAGGACACCGCCGTGTACTACTGCGCCAGAGGCGGCA |
| | | | | TCCAGCTGTGGCTGCACTTCGACTACTGGGGCCAGGGCACCCT |
| | | | | GGTCACCGTGTCTAGCGGAGGCGGAGGATCTGGTGGCGGTGGT |
| | | | | TCTGGCGGCGGAGGCTCTCAGTCTGCCCTGACCCAGCCTCCTT |
| | | | | CTGCCACCGGCACCCCTGGCCAGCGCGTGACCATCTCCTGCTC |
| | | | | CGGCTCCTCCTCCAACATCGGCCGGAACTTCGTGAACTGGTAC |
| | | | | AAGCAGCTGCCCGGCACCGCCCCCAAGGTGCTGATCTACACCA |
| | | | | ACAACCAGCGGCCCTCCGGCGTGCCCGACCGGTTCTCTGGCTC |
| | | | | CAAGTCTGGCACCTCCGCCTCCCTGGCCATCTCCGGCCTGCAG |
| | | | | TCCGAGGACGAGTCCGACTACTACTGTGCCGCCTGGGACGACT |
| | | | | CCCTGAACGGCTGGGTGTTCGGCGGAGGCACCAAGCTGACCGT |
| | | | | GCTG |
| 1085 | VH-VL of | artificial | AA | QVQLVQSGAEVKKPGASVKVSCKASGYTFTSYYIHWVRQAPGQ |
| | CDH19 25F8.1 | | | GLEWMGIINPSGGSTRYAQKFQGRVTMTRDTSTSTVFMELSSL |
| | | | | RSEDTAVYYCARGGIQLWLHFDYWGQGTLVTVSSGGGGSGGGG |
| | | | | SGGGGSQSALTQPPSATGTPGQRVTISCSGSSSNIGRNFVNWY |
| | | | | KQLPGTAPKVLIYTNNQRPSGVPDRFSGSKSGTSASLAISGLQ |
| | | | | SEDESDYYCAAWDDSLNGWVFGGGTKLTVL |
| 1086 | CDH19 25F8.1 | artificial | | QVQLVQSGAEVKKPGASVKVSCKASGYTFTSYYIHWVRQAPGQ |
| | x I2C | | | GLEWMGIINPSGGSTRYAQKFQGRVTMTRDTSTSTVFMELSSL |
| | | | | RSEDTAVYYCARGGIQLWLHFDYWGQGTLVTVSSGGGGSGGGG |
| | | | | SGGGGSQSALTQPPSATGTPGQRVTISCSGSSSNIGRNFVNWY |
| | | | | KQLPGTAPKVLIYTNNQRPSGVPDRFSGSKSGTSASLAISGLQ |
| | | | | SEDESDYYCAAWDDSLNGWVFGGGTKLTVLSGGGGSEVQLVES |
| | | | | GGGLVQPGGSLKLSCAASGFTFNKYAMNWVRQAPGKGLEWVAR |
| | | | | IRSKYNNYATYYADSVKDRFTISRDDSKNTAYLQMNNLKTEDT |
| | | | | AVYYCVRHGNFGNSYISYWAYWGQGTLVTVSSGGGGSGGGGSG |
| | | | | GGGSQTVVTQEPSLTVSPGGTVTLTCGSSTGAVTSGNYPNWVQ |
| | | | | QKPGQAPRGLIGGTKFLAPGTPARFSGSLLGGKAALTLSGVQP |
| | | | | EDEAEYYCVLWYSNRWVFGGGTKLTVLHHHHHH |
| 1087 | CDR-H1 of | artificial | AA | GYYWS |
| | CDH19 | | | |
| | 25G10.1 | | | |
| 1088 | CDR-H2 of | artificial | AA | YIYYIGSTNYNPSLKS |
| | CDH19 | | | |
| | 25G10.1 | | | |
| 1089 | CDR-H3 of | artificial | AA | DGSSGWYRWFDP |
| | CDH19 | | | |
| | 25G10.1 | | | |
| 1090 | CDR-L1 of | artificial | AA | RASQSVSSSYLA |
| | CDH19 | | | |
| | 25G10.1 | | | |
| 1091 | CDR-L2 of | artificial | AA | GASSRAT |
| | CDH19 | | | |
| | 25G10.1 | | | |
| 1092 | CDR-L3 of | artificial | AA | QQYGNSPLT |
| | CDH19 | | | |
| | 25G10.1 | | | |
| 1093 | VH of CDH19 | artificial | NT | CAGGTGCAGCTGCAGGAATCCGGCCCTGGCCTGGTCAAGCCCT |
| | 25G10.1 | | | CCGAGACACTGTCCCTGACCTGCACCGTGTCCGGCGGCTCCAT |
| | | | | CTCCGGCTACTACTGGTCCTGGATCCGGCAGCCCCCTGGCAAG |
| | | | | GGCCTGGAATGGATCGGCTACATCTACTACATCGGCTCCACCA |
| | | | | ACTACAACCCCAGCCTGAAGTCCAGAGTGACCATGTCCGTGGA |
| | | | | CACCTCCAAGAACCAGTTCTCCCTGAAGCTGTCCTCCGTGACC |
| | | | | GCCGCTGACACCGCCGTGTACTACTGCGCCAGAGATGGCTCCT |
| | | | | CCGGCTGGTATCGTTGGTTCGACCCTTGGGGCCAGGGCACCCT |
| | | | | GGTCACCGTGTCTAGC |
| 1094 | VH of CDH19 | artificial | AA | QVQLQESGPGLVKPSETLSLTCTVSGGSISGYYWSWIRQPPGK |
| | 25G10.1 | | | GLEWIGYIYYIGSTNYNPSLKSRVTMSVDTSKNQFSLKLSSVT |
| | | | | AADTAVYYCARDGSSGWYRWFDPWGQGTLVTVSS |
| 1095 | VL of CDH19 | artificial | NT | GAGATCGTGCTGACCCAGTCCCCTGGCACCCTGTCCCTGAGCC |
| | 25G10.1 | | | CTGGCGAGAGAGCCACCCTGTCCTGCAGAGCCTCCCAGTCCGT |
| | | | | GTCCTCCTCCTACCTGGCTTGGTATCAGCAGAAGCCCGGCCAG |
| | | | | GCCCCTCGGCTGCTGATCTTCGGCGCCTCTTCCAGAGCCACCG |
| | | | | GCATCCCTGACCGGTTCTCCGGCTCTGGCTCCGGCACCGACTT |
| | | | | CACCCTGACCATCTCCCGGCTGGAACCCGAGGACTTCGCTGTG |
| | | | | TACCACTGCCAGCAGTACGGCAACAGCCCCCTGACCTTCGGCG |
| | | | | GAGGCACCAAGGTGGAAATCAAG |
| 1096 | VL of CDH19 | artificial | AA | EIVLTQSPGTLSLSPGERATLSCRASQSVSSSYLAWYQQKPGQ |
| | 25G10.1 | | | APRLLIFGASSRATGIPDRFSGSGSGTDFTLTISRLEPEDFAV |
| | | | | YHCQQYGNSPLTFGGGTKVEIK |
| 1097 | VH-VL of | artificial | NT | CAGGTGCAGCTGCAGGAATCCGGCCCTGGCCTGGTCAAGCCCT |
| | CDH19 | | | CCGAGACACTGTCCCTGACCTGCACCGTGTCCGGCGGCTCCAT |
| | 25G10.1 | | | CTCCGGCTACTACTGGTCCTGGATCCGGCAGCCCCCTGGCAAG |
| | | | | GGCCTGGAATGGATCGGCTACATCTACTACATCGGCTCCACCA |
| | | | | ACTACAACCCCAGCCTGAAGTCCAGAGTGACCATGTCCGTGGA |
| | | | | CACCTCCAAGAACCAGTTCTCCCTGAAGCTGTCCTCCGTGACC |
| | | | | GCCGCTGACACCGCCGTGTACTACTGCGCCAGAGATGGCTCCT |
| | | | | CCGGCTGGTATCGTTGGTTCGACCCTTGGGGCCAGGGCACCCT |
| | | | | GGTCACCGTGTCTAGCGGAGGCGGAGGATCTGGTGGCGGTGGT |
| | | | | TCTGGCGGCGGAGGCTCCGAGATCGTGCTGACCCAGTCCCCTG |
| | | | | GCACCCTGTCCCTGAGCCCTGGCGAGAGAGCCACCCTGTCCTG |
| | | | | CAGAGCCTCCCAGTCCGTGTCCTCCTCCTACCTGGCTTGGTAT |
| | | | | CAGCAGAAGCCCGGCCAGGCCCCTCGGCTGCTGATCTTCGGCG |
| | | | | CCTCTTCCAGAGCCACCGGCATCCCTGACCGGTTCTCCGGCTC |
| | | | | TGGCTCCGGCACCGACTTCACCCTGACCATCTCCCGGCTGGAA |
| | | | | CCCGAGGACTTCGCTGTGTACCACTGCCAGCAGTACGGCAACA |
| | | | | GCCCCCTGACCTTCGGCGGAGGCACCAAGGTGGAAATCAAG |
| 1098 | VH-VL of | artificial | AA | QVQLQESGPGLVKPSETLSLTCTVSGGSISGYYWSWIRQPPGK |
| | CDH19 | | | GLEWIGYIYYIGSTNYNPSLKSRVTMSVDTSKNQFSLKLSSVT |
| | 25G10.1 | | | AADTAVYYCARDGSSGWYRWFDPWGQGTLVTVSSGGGGSGGGG |
| | | | | SGGGGSEIVLTQSPGTLSLSPGERATLSCRASQSVSSSYLAWY |
| | | | | QQKPGQAPRLLIFGASSRATGIPDRFSGSGSGTDFTLTISRLE |
| | | | | PEDFAVYHCQQYGNSPLTFGGGTKVEIK |
| 1099 | CDH19 | artificial | | QVQLQESGPGLVKPSETLSLTCTVSGGSISGYYWSWIRQPPGK |
| | 25G10.1 x I2C | | | GLEWIGYIYYIGSTNYNPSLKSRVTMSVDTSKNQFSLKLSSVT |
| | | | | AADTAVYYCARDGSSGWYRWFDPWGQGTLVTVSSGGGGSGGGG |
| | | | | SGGGGSEIVLTQSPGTLSLSPGERATLSCRASQSVSSSYLAWY |
| | | | | QQKPGQAPRLLIFGASSRATGIPDRFSGSGSGTDFTLTISRLE |
| | | | | PEDFAVYHCQQYGNSPLTFGGGTKVEIKSGGGGSEVQLVESGG |
| | | | | GLVQPGGSLKLSCAASGFTFNKYAMNWVRQAPGKGLEWVARIR |
| | | | | SKYNNYATYYADSVKDRFTISRDDSKNTAYLQMNNLKTEDTAV |
| | | | | YYCVRHGNFGNSYISYWAYWGQGTLVTVSSGGGGSGGGGSGGG |
| | | | | GSQTVVTQEPSLTVSPGGTVTLTCGSSTGAVTSGNYPNWVQQK |
| | | | | PGQAPRGLIGGTKFLAPGTPARFSGSLLGGKAALTLSGVQPED |
| | | | | EAEYYCVLWYSNRWVFGGGTKLTVLHHHHHH |
| 1100 | CDR-H1 of | artificial | AA | SYYMS |
| | CDH19 26D1.1 | | | |
| 1101 | CDR-H2 of | artificial | AA | IIHPSGGDTTYAQKFQG |
| | CDH19 26D1.1 | | | |
| 1102 | CDR-H3 of | artificial | AA | GGIKLWLHFDY |
| | CDH19 26D1.1 | | | |
| 1103 | CDR-L1 of | artificial | AA | SGSRSNIGSNFVN |
| | CDH19 26D1.1 | | | |
| 1104 | CDR-L2 of | artificial | AA | TNNQRPS |
| | CDH19 26D1.1 | | | |
| 1105 | CDR-L3 of | artificial | AA | AVWDDSLNGWV |
| | CDH19 26D1.1 | | | |
| 1106 | VH of CDH19 | artificial | NT | CAGGTGCAGCTGGTGCAGTCTGGCGCCGAAGTGAAGAAACCTG |
| | 26D1.1 | | | GCGCCTCCGTGAAGGTGTCCTGCAAGGCCTCCCGGTACACCTT |
| | | | | CACCAGCTACTACATGTCCTGGGTCCGACAGGCCCCAGGCCAG |
| | | | | GGCCTGGAATGGATGGGCATCATCCACCCCTCTGGCGGCGACA |
| | | | | CCACCTACGCCCAGAAATTCCAGGGCAGAGTGACCATGACCGG |
| | | | | CGACACCTCCACCTCCACCGTGTATATGGAACTGTCCTCCCTG |
| | | | | CGGAGCGAGGACACCGCCGTGTACTACTGCGCCAGAGGCGGCA |
| | | | | TCAAGCTGTGGCTGCACTTCGACTACTGGGGCCAGGGCACCCT |
| | | | | GGTCACCGTGTCTAGC |
| 1107 | VH of CDH19 | artificial | AA | QVQLVQSGAEVKKPGASVKVSCKASRYTFTSYYMSWVRQAPGQ |
| | 26D1.1 | | | GLEWMGIIHPSGGDTTYAQKFQGRVTMTGDTSTSTVYMELSSL |
| | | | | RSEDTAVYYCARGGIKLWLHFDYWGQGTLVTVSS |
| 1108 | VL of CDH19 | artificial | NT | CATTCCGTGCTGACCCAGTCTCCTTCCGCCTCCGGCACCCCTG |
| | 26D1.1 | | | GCCAGCGCGTGACCATCTCCTGCTCCGGCTCCCGGTCCAACAT |
| | | | | CGGCTCCAACTTCGTGAACTGGTATCAGCAGCTGCCCGGCACC |
| | | | | GCCCCCAAGCTGCTGATCTACACCAACAACCAGCGGCCCTCCG |
| | | | | GCGTGCCCGACCGGTTCTCTGGCTCCAAGTCTGGCACCTCCGC |
| | | | | CTCCCTGGCCATCTCCGGCCTGCAGTCTGAGGACGAGGCCGAC |
| | | | | TACTACTGTGCCGTGTGGGACGACTCCCTGAACGGCTGGGTGT |
| | | | | TCGGCGGAGGCACCAAGCTGACCGTGCTG |
| 1109 | VL of CDH19 | artificial | AA | HSVLTQSPSASGTPGQRVTISCSGSRSNIGSNFVNWYQQLPGT |
| | 26D1.1 | | | APKLLIYTNNQRPSGVPDRFSGSKSGTSASLAISGLQSEDEAD |
| | | | | YYCAVWDDSLNGWVFGGGTKLTVL |
| 1110 | VH-VL of | artificial | NT | CAGGTGCAGCTGGTGCAGTCTGGCGCCGAAGTGAAGAAACCTG |
| | CDH19 26D1.1 | | | GCGCCTCCGTGAAGGTGTCCTGCAAGGCCTCCCGGTACACCTT |
| | | | | CACCAGCTACTACATGTCCTGGGTCCGACAGGCCCCAGGCCAG |
| | | | | GGCCTGGAATGGATGGGCATCATCCACCCCTCTGGCGGCGACA |
| | | | | CCACCTACGCCCAGAAATTCCAGGGCAGAGTGACCATGACCGG |
| | | | | CGACACCTCCACCTCCACCGTGTATATGGAACTGTCCTCCCTG |
| | | | | CGGAGCGAGGACACCGCCGTGTACTACTGCGCCAGAGGCGGCA |
| | | | | TCAAGCTGTGGCTGCACTTCGACTACTGGGGCCAGGGCACCCT |
| | | | | GGTCACCGTGTCTAGCGGAGGCGGAGGATCTGGTGGCGGTGGT |
| | | | | TCTGGCGGCGGAGGCTCCCATTCCGTGCTGACCCAGTCTCCTT |
| | | | | CCGCCTCCGGCACCCCTGGCCAGCGCGTGACCATCTCCTGCTC |
| | | | | CGGCTCCCGGTCCAACATCGGCTCCAACTTCGTGAACTGGTAT |
| | | | | CAGCAGCTGCCCGGCACCGCCCCCAAGCTGCTGATCTACACCA |
| | | | | ACAACCAGCGGCCCTCCGGCGTGCCCGACCGGTTCTCTGGCTC |
| | | | | CAAGTCTGGCACCTCCGCCTCCCTGGCCATCTCCGGCCTGCAG |
| | | | | TCTGAGGACGAGGCCGACTACTACTGTGCCGTGTGGGACGACT |
| | | | | CCCTGAACGGCTGGGTGTTCGGCGGAGGCACCAAGCTGACCGT |
| | | | | GCTG |
| 1111 | VH-VL of | artificial | AA | QVQLVQSGAEVKKPGASVKVSCKASRYTFTSYYMSWVRQAPGQ |
| | CDH19 26D1.1 | | | GLEWMGIIHPSGGDTTYAQKFQGRVTMTGDTSTSTVYMELSSL |
| | | | | RSEDTAVYYCARGGIKLWLHFDYWGQGTLVTVSSGGGGSGGGG |
| | | | | SGGGGSHSVLTQSPSASGTPGQRVTISCSGSRSNIGSNFVNWY |
| | | | | QQLPGTAPKLLIYTNNQRPSGVPDRFSGSKSGTSASLAISGLQ |
| | | | | SEDEADYYCAVWDDSLNGWVFGGGTKLTVL |
| 1112 | CDH19 26D1.1 | artificial | | QVQLVQSGAEVKKPGASVKVSCKASRYTFTSYYMSWVRQAPGQ |
| | x I2C | | | GLEWMGIIHPSGGDTTYAQKFQGRVTMTGDTSTSTVYMELSSL |
| | | | | RSEDTAVYYCARGGIKLWLHFDYWGQGTLVTVSSGGGGSGGGG |
| | | | | SGGGGSHSVLTQSPSASGTPGQRVTISCSGSRSNIGSNFVNWY |
| | | | | QQLPGTAPKLLIYTNNQRPSGVPDRFSGSKSGTSASLAISGLQ |
| | | | | SEDEADYYCAVWDDSLNGWVFGGGTKLTVLSGGGGSEVQLVES |
| | | | | GGGLVQPGGSLKLSCAASGFTFNKYAMNWVRQAPGKGLEWVAR |
| | | | | IRSKYNNYATYYADSVKDRFTISRDDSKNTAYLQMNNLKTEDT |
| | | | | AVYYCVRHGNFGNSYISYWAYWGQGTLVTVSSGGGGSGGGGSG |
| | | | | GGGSQTVVTQEPSLTVSPGGTVTLTCGSSTGAVTSGNYPNWVQ |
| | | | | QKPGQAPRGLIGGTKFLAPGTPARFSGSLLGGKAALTLSGVQP |
| | | | | EDEAEYYCVLWYSNRWVFGGGTKLTVLHHHHHH |
| 1113 | CDR-H1 of | artificial | AA | NYYMS |
| | CDH19 | | | |
| | 26F12.1 | | | |
| 1114 | CDR-H2 of | artificial | AA | IINPSGGDSTYAQKFQG |
| | CDH19 | | | |
| | 26F12.1 | | | |
| 1115 | CDR-H3 of | artificial | AA | GGIQLWLHFDY |
| | CDH19 | | | |
| | 26F12.1 | | | |
| 1116 | CDR-L1 of | artificial | AA | SGSRSNIGSNFVN |
| | CDH19 | | | |
| | 26F12.1 | | | |
| 1117 | CDR-L2 of | artificial | AA | TNYQRPS |
| | CDH19 | | | |
| | 26F12.1 | | | |
| 1118 | CDR-L3 of | artificial | AA | AVWDDSLNGWV |
| | CDH19 | | | |
| | 26F12.1 | | | |
| 1119 | VH of CDH19 | artificial | NT | CAGGTGCAGCTGGTGCAGTCTGGCGCCGAAGTGAAGAAACCTG |
| | 26F12.1 | | | GCGCCTCCGTGAAGGTGTCCTGCAAGGCCTCCCGGTACACCTT |
| | | | | CACCAACTACTACATGTCCTGGGTCCGACAGGCCCCAGGCCAG |
| | | | | GGCCTGGAATGGATGGGCATCATCAACCCCTCTGGCGGCGACT |
| | | | | CCACCTACGCCCAGAAGTTCCAGGGCCGGCTGACCATGACCGG |
| | | | | CGACACCTCCACCTCCACCGTGTATATGGAACTGTCCTCCCTG |
| | | | | CGGAGCGAGGACACCGCCGTGTACTACTGCGCCAGAGGCGGCA |
| | | | | TCCAGCTGTGGCTGCACTTCGACTACTGGGGCCAGGGCACCCT |
| | | | | GGTCACCGTGTCTAGC |
| 1120 | VH of CDH19 | artificial | AA | QVQLVQSGAEVKKPGASVKVSCKASRYTFTNYYMSWVRQAPGQ |
| | 26F12.1 | | | GLEWMGIINPSGGDSTYAQKFQGRLTMTGDTSTSTVYMELSSL |
| | | | | RSEDTAVYYCARGGIQLWLHFDYWGQGTLVTVSS |
| 1121 | VL of CDH19 | artificial | NT | CAGTCTGTGCTGACCCAGTCCCCTTCCGCCTCTGGCACCCCTG |
| | 26F12.1 | | | GCCAGAAAGTGACCATCTCCTGCTCCGGCTCCCGGTCCAACAT |
| | | | | CGGCTCCAACTTCGTGAACTGGTATCAGCAGCTGCCCGGCACC |
| | | | | GCCCCCAAGCTGCTGATCTACACCAACTACCAGCGGCCCTCCG |
| | | | | GCGTGCCCGACCGGTTCTCTGGCTCCAAGTCTGGCACCTCCGC |
| | | | | CTCCCTGGCCATCTCCGGCCTGCAGTCTGAGGACGAGGCCGAC |
| | | | | TACTACTGTGCCGTGTGGGACGACTCCCTGAACGGCTGGGTGT |
| | | | | TCGGCGGAGGCACCAAGCTGACCGTGCTG |
| 1122 | VL of CDH19 | artificial | AA | QSVLTQSPSASGTPGQKVTISCSGSRSNIGSNFVNWYQQLPGT |
| | 26F12.1 | | | APKLLIYTNYQRPSGVPDRFSGSKSGTSASLAISGLQSEDEAD |
| | | | | YYCAVWDDSLNGWVFGGGTKLTVL |
| 1123 | VH-VL of | artificial | NT | CAGGTGCAGCTGGTGCAGTCTGGCGCCGAAGTGAAGAAACCTG |
| | CDH19 | | | GCGCCTCCGTGAAGGTGTCCTGCAAGGCCTCCCGGTACACCTT |
| | 26F12.1 | | | CACCAACTACTACATGTCCTGGGTCCGACAGGCCCCAGGCCAG |
| | | | | GGCCTGGAATGGATGGGCATCATCAACCCCTCTGGCGGCGACT |
| | | | | CCACCTACGCCCAGAAGTTCCAGGGCCGGCTGACCATGACCGG |
| | | | | CGACACCTCCACCTCCACCGTGTATATGGAACTGTCCTCCCTG |
| | | | | CGGAGCGAGGACACCGCCGTGTACTACTGCGCCAGAGGCGGCA |
| | | | | TCCAGCTGTGGCTGCACTTCGACTACTGGGGCCAGGGCACCCT |
| | | | | GGTCACCGTGTCTAGCGGAGGCGGAGGATCTGGTGGCGGTGGT |
| | | | | TCTGGCGGCGGAGGCTCCCAGTCTGTGCTGACCCAGTCCCCTT |
| | | | | CCGCCTCTGGCACCCCTGGCCAGAAAGTGACCATCTCCTGCTC |
| | | | | CGGCTCCCGGTCCAACATCGGCTCCAACTTCGTGAACTGGTAT |
| | | | | CAGCAGCTGCCCGGCACCGCCCCCAAGCTGCTGATCTACACCA |
| | | | | ACTACCAGCGGCCCTCCGGCGTGCCCGACCGGTTCTCTGGCTC |
| | | | | CAAGTCTGGCACCTCCGCCTCCCTGGCCATCTCCGGCCTGCAG |
| | | | | TCTGAGGACGAGGCCGACTACTACTGTGCCGTGTGGGACGACT |
| | | | | CCCTGAACGGCTGGGTGTTCGGCGGAGGCACCAAGCTGACCGT |
| | | | | GCTG |
| 1124 | VH-VL of | artificial | AA | QVQLVQSGAEVKKPGASVKVSCKASRYTFTNYYMSWVRQAPGQ |
| | CDH19 | | | GLEWMGIINPSGGDSTYAQKFQGRLTMTGDTSTSTVYMELSSL |
| | 26F12.1 | | | RSEDTAVYYCARGGIQLWLHFDYWGQGTLVTVSSGGGGSGGGG |
| | | | | SGGGGSQSVLTQSPSASGTPGQKVTISCSGSRSNIGSNFVNWY |
| | | | | QQLPGTAPKLLIYTNYQRPSGVPDRFSGSKSGTSASLAISGLQ |
| | | | | SEDEADYYCAVWDDSLNGWVFGGGTKLTVL |
| 1125 | CDH19 | artificial | | QVQLVQSGAEVKKPGASVKVSCKASRYTFTNYYMSWVRQAPGQ |
| | 26F12.1 x I2C | | | GLEWMGIINPSGGDSTYAQKFQGRLTMTGDTSTSTVYMELSSL |
| | | | | RSEDTAVYYCARGGIQLWLHFDYWGQGTLVTVSSGGGGSGGGG |
| | | | | SGGGGSQSVLTQSPSASGTPGQKVTISCSGSRSNIGSNFVNWY |
| | | | | QQLPGTAPKLLIYTNYQRPSGVPDRFSGSKSGTSASLAISGLQ |
| | | | | SEDEADYYCAVWDDSLNGWVFGGGTKLTVLSGGGGSEVQLVES |
| | | | | GGGLVQPGGSLKLSCAASGFTFNKYAMNWVRQAPGKGLEWVAR |
| | | | | IRSKYNNYATYYADSVKDRFTISRDDSKNTAYLQMNNLKTEDT |
| | | | | AVYYCVRHGNFGNSYISYWAYWGQGTLVTVSSGGGGSGGGGSG |
| | | | | GGGSQTVVTQEPSLTVSPGGTVTLTCGSSTGAVTSGNYPNWVQ |
| | | | | QKPGQAPRGLIGGTKFLAPGTPARFSGSLLGGKAALTLSGVQP |
| | | | | EDEAEYYCVLWYSNRWVFGGGTKLTVLHHHHHH |
| 1126 | CDR-H1 of | artificial | AA | GYYWS |
| | CDH19 4A9 | | | |
| 1127 | CDR-H2 of | artificial | AA | YFSYSGSTNYNPSLKS |
| | CDH19 4A9 | | | |
| 1128 | CDR-H3 of | artificial | AA | NWAFHFDF |
| | CDH19 4A9 | | | |
| 1129 | CDR-L1 of | artificial | AA | TGSSSNIGTGYAVH |
| | CDH19 4A9 | | | |
| 1130 | CDR-L2 of | artificial | AA | GNNNRPS |
| | CDH19 4A9 | | | |
| 1131 | CDR-L3 of | artificial | AA | QSYDSRLSGWV |
| | CDH19 4A9 | | | |
| 1132 | VH of CDH19 | artificial | NT | CAGGTGCAGCTGCAGGAATCCGGCCCTGGCCTGGTCAAGCCCT |
| | 4A9 | | | CCGAGACACTGTCCCTGACCTGCACCGTGTCCGGCGGCTCCAT |
| | | | | CTCCGGCTACTACTGGTCCTGGATCCGGCAGCCCCCTGGCAAG |
| | | | | GGCCTGGAATGGTTCGCCTACTTCTCCTACTCCGGCTCCACCA |
| | | | | ACTACAACCCCAGCCTGAAGTCCAGAGTGACCCTGTCCGTGGA |
| | | | | CACCTCCAAGAACCAGTTCTCCCTGAAGCTGTCCTCCGTGACC |
| | | | | GCCGCTGACACCGCCGTGTACTACTGCGCCCGGAACTGGGCCT |
| | | | | TCCACTTCGATTTCTGGGGCCAGGGCACCCTGGTCACCGTGTC |
| | | | | TAGC |
| 1133 | VH of CDH19 | artificial | AA | QVQLQESGPGLVKPSETLSLTCTVSGGSISGYYWSWIRQPPGK |
| | 4A9 | | | GLEWFAYFSYSGSTNYNPSLKSRVTLSVDTSKNQFSLKLSSVT |
| | | | | AADTAVYYCARNWAFHFDFWGQGTLVTVSS |
| 1134 | VL of CDH19 | artificial | NT | CAGTCTGTGCTGACCCAGCCTCCCTCTGTGTCTGGCGCCCCTG |
| | 4A9 | | | GCCAGAGAGTGACCATCTCCTGCACCGGCTCCTCCAGCAACAT |
| | | | | CGGCACCGGCTACGCCGTGCACTGGTATCAGCAGTTCCCCGGC |
| | | | | ACCGCCCCCAAGCTGCTGATCTACGGCAACAACAACCGGCCCT |
| | | | | CCGGCGTGCCCGACCGGTTCTCTGGCTCCAAGTCTGGCACCTC |
| | | | | CGCCTCCCTGGCTATCACCGGCCTGCAGGCTGAGGACGAGGCC |
| | | | | GACTACTACTGCCAGTCCTACGACTCCCGGCTGTCCGGCTGGG |
| | | | | TGTTCGGCGGAGGCACCAAGCTGACCGTGCTG |
| 1135 | VL of CDH19 | artificial | AA | QSVLTQPPSVSGAPGQRVTISCTGSSSNIGTGYAVHWYQQFPG |
| | 4A9 | | | TAPKLLIYGNNNRPSGVPDRFSGSKSGTSASLAITGLQAEDEA |
| | | | | DYYCQSYDSRLSGWVFGGGTKLTVL |
| 1136 | VH-VL of | artificial | NT | CAGGTGCAGCTGCAGGAATCCGGCCCTGGCCTGGTCAAGCCCT |
| | CDH19 4A9 | | | CCGAGACACTGTCCCTGACCTGCACCGTGTCCGGCGGCTCCAT |
| | | | | CTCCGGCTACTACTGGTCCTGGATCCGGCAGCCCCCTGGCAAG |
| | | | | GGCCTGGAATGGTTCGCCTACTTCTCCTACTCCGGCTCCACCA |
| | | | | ACTACAACCCCAGCCTGAAGTCCAGAGTGACCCTGTCCGTGGA |
| | | | | CACCTCCAAGAACCAGTTCTCCCTGAAGCTGTCCTCCGTGACC |
| | | | | GCCGCTGACACCGCCGTGTACTACTGCGCCCGGAACTGGGCCT |
| | | | | TCCACTTCGATTTCTGGGGCCAGGGCACCCTGGTCACCGTGTC |
| | | | | TAGCGGAGGCGGAGGATCTGGTGGCGGTGGTTCTGGCGGCGGA |
| | | | | GGCTCCCAGTCTGTGCTGACCCAGCCTCCCTCTGTGTCTGGCG |
| | | | | CCCCTGGCCAGAGAGTGACCATCTCCTGCACCGGCTCCTCCAG |
| | | | | CAACATCGGCACCGGCTACGCCGTGCACTGGTATCAGCAGTTC |
| | | | | CCCGGCACCGCCCCCAAGCTGCTGATCTACGGCAACAACAACC |
| | | | | GGCCCTCCGGCGTGCCCGACCGGTTCTCTGGCTCCAAGTCTGG |
| | | | | CACCTCCGCCTCCCTGGCTATCACCGGCCTGCAGGCTGAGGAC |
| | | | | GAGGCCGACTACTACTGCCAGTCCTACGACTCCCGGCTGTCCG |
| | | | | GCTGGGTGTTCGGCGGAGGCACCAAGCTGACCGTGCTG |
| 1137 | VH-VL of | artificial | AA | QVQLQESGPGLVKPSETLSLTCTVSGGSISGYYWSWIRQPPGK |
| | CDH19 4A9 | | | GLEWFAYFSYSGSTNYNPSLKSRVTLSVDTSKNQFSLKLSSVT |
| | | | | AADTAVYYCARNWAFHFDFWGQGTLVTVSSGGGGSGGGGSGGG |
| | | | | GSQSVLTQPPSVSGAPGQRVTISCTGSSSNIGTGYAVHWYQQF |
| | | | | PGTAPKLLIYGNNNRPSGVPDRFSGSKSGTSASLAITGLQAED |
| | | | | EADYYCQSYDSRLSGWVFGGGTKLTVL |
| 1138 | CDH19 4A9 x | artificial | | QVQLQESGPGLVKPSETLSLTCTVSGGSISGYYWSWIRQPPGK |
| | I2C | | | GLEWFAYFSYSGSTNYNPSLKSRVTLSVDTSKNQFSLKLSSVT |
| | | | | AADTAVYYCARNWAFHFDFWGQGTLVTVSSGGGGSGGGGSGGG |
| | | | | GSQSVLTQPPSVSGAPGQRVTISCTGSSSNIGTGYAVHWYQQF |
| | | | | PGTAPKLLIYGNNNRPSGVPDRFSGSKSGTSASLAITGLQAED |
| | | | | EADYYCQSYDSRLSGWVFGGGTKLTVLSGGGGSEVQLVESGGG |
| | | | | LVQPGGSLKLSCAASGFTFNKYAMNWVRQAPGKGLEWVARIRS |
| | | | | KYNNYATYYADSVKDRFTISRDDSKNTAYLQMNNLKTEDTAVY |
| | | | | YCVRHGNFGNSYISYWAYWGQGTLVTVSSGGGGSGGGGSGGGG |
| | | | | SQTVVTQEPSLTVSPGGTVTLTCGSSTGAVTSGNYPNWVQQKP |
| | | | | GQAPRGLIGGTKFLAPGTPARFSGSLLGGKAALTLSGVQPEDE |
| | | | | AEYYCVLWYSNRWVFGGGTKLTVLHHHHHH |
| 1139 | CDR-H1 of | artificial | AA | SYDMH |
| | CDH19 4B10 | | | |
| 1140 | CDR-H2 of | artificial | AA | VISYDGTNEYYADSVKG |
| | CDH19 4B10 | | | |
| 1141 | CDR-H3 of | artificial | AA | ERYFDWSFDY |
| | CDH19 4B10 | | | |
| 1142 | CDR-L1 of | artificial | AA | RASQSVSNTYLA |
| | CDH19 4B10 | | | |
| 1143 | CDR-L2 of | artificial | AA | GASSRAT |
| | CDH19 4B10 | | | |
| 1144 | CDR-L3 of | artificial | AA | QQYSNSWT |
| | CDH19 4B10 | | | |
| 1145 | VH of CDH19 | artificial | NT | CAGGTGCAGCTGGTGGAATCCGGCGGAGGCGTGGTGCAGCCTG |
| | 4B10 | | | GCCGGTCCCTGAGACTGTCTTGCGCCGCCTCCGGCTTCACCTT |
| | | | | CTCCAGCTACGACATGCACTGGGTCCGACAGGCCCCTGGCAAG |
| | | | | GGCCTGGAATGGGTGGCCGTGATCTCCTACGACGGCACCAACG |
| | | | | AGTACTACGCCGACTCCGTGAAGGGCCGGTTCACCATCTCCCG |
| | | | | GGACACCTCCAAGAACACCCTGTACCTGCAGATGAACTCCCTG |
| | | | | CGGGCCGAGGACACCGCCGTGTACTACTGCGCCAGAGAGCGGT |
| | | | | ACTTCGACTGGTCCTTCGACTACTGGGGCCAGGGCACCCTGGT |
| | | | | GTCCGTGTCTAGC |
| 1146 | VH of CDH19 | artificial | AA | QVQLVESGGGVVQPGRSLRLSCAASGFTFSSYDMHWVRQAPGK |
| | 4B10 | | | GLEWVAVISYDGTNEYYADSVKGRFTISRDTSKNTLYLQMNSL |
| | | | | RAEDTAVYYCARERYFDWSFDYWGQGTLVSVSS |
| 1147 | VL of CDH19 | artificial | NT | GAGATCGTGCTGACCCAGTCCCCTGGCACCCTGTCCCTGAGCC |
| | 4B10 | | | CTGGCGAGAGAGCCACCCTGTCTTGCCGGGCCTCCCAGTCCGT |
| | | | | GTCCAACACCTACCTGGCCTGGTATCACCAGCGCCCTGGCCAG |
| | | | | GCCCCTCGGCTGCTGATCTACGGCGCCTCTTCCAGAGCCACCG |
| | | | | GCATCCCTGACCGGTTCTCCGGCTCTGGCTCTGGCACCGACTT |
| | | | | CGCCCTGACCATCTCCAGCCTGGAACCCGAGGATTTCGCTGTG |
| | | | | TACTATTGCCAGCAGTACTCCAACTCCTGGACCTTCGGACAGG |
| | | | | GCACCAAGGTGGAAATCAAG |
| 1148 | VL of CDH19 | artificial | AA | EIVLTQSPGTLSLSPGERATLSCRASQSVSNTYLAWYHQRPGQ |
| | 4B10 | | | APRLLIYGASSRATGIPDRFSGSGSGTDFALTISSLEPEDFAV |
| | | | | YYCQQYSNSWTFGQGTKVEIK |
| 1149 | VH-VL of | artificial | NT | CAGGTGCAGCTGGTGGAATCCGGCGGAGGCGTGGTGCAGCCTG |
| | CDH19 4B10 | | | GCCGGTCCCTGAGACTGTCTTGCGCCGCCTCCGGCTTCACCTT |
| | | | | CTCCAGCTACGACATGCACTGGGTCCGACAGGCCCCTGGCAAG |
| | | | | GGCCTGGAATGGGTGGCCGTGATCTCCTACGACGGCACCAACG |
| | | | | AGTACTACGCCGACTCCGTGAAGGGCCGGTTCACCATCTCCCG |
| | | | | GGACACCTCCAAGAACACCCTGTACCTGCAGATGAACTCCCTG |
| | | | | CGGGCCGAGGACACCGCCGTGTACTACTGCGCCAGAGAGCGGT |
| | | | | ACTTCGACTGGTCCTTCGACTACTGGGGCCAGGGCACCCTGGT |
| | | | | GTCCGTGTCTAGCGGAGGCGGAGGATCTGGTGGCGGTGGTTCT |
| | | | | GGCGGCGGAGGCTCCGAGATCGTGCTGACCCAGTCCCCTGGCA |
| | | | | CCCTGTCCCTGAGCCCTGGCGAGAGAGCCACCCTGTCTTGCCG |
| | | | | GGCCTCCCAGTCCGTGTCCAACACCTACCTGGCCTGGTATCAC |
| | | | | CAGCGCCCTGGCCAGGCCCCTCGGCTGCTGATCTACGGCGCCT |
| | | | | CTTCCAGAGCCACCGGCATCCCTGACCGGTTCTCCGGCTCTGG |
| | | | | CTCTGGCACCGACTTCGCCCTGACCATCTCCAGCCTGGAACCC |
| | | | | GAGGATTTCGCTGTGTACTATTGCCAGCAGTACTCCAACTCCT |
| | | | | GGACCTTCGGACAGGGCACCAAGGTGGAAATCAAG |
| 1150 | VH-VL of | artificial | AA | QVQLVESGGGVVQPGRSLRLSCAASGFTFSSYDMHWVRQAPGK |
| | CDH19 4B10 | | | GLEWVAVISYDGTNEYYADSVKGRFTISRDTSKNTLYLQMNSL |
| | | | | RAEDTAVYYCARERYFDWSFDYWGQGTLVSVSSGGGGSGGGGS |
| | | | | GGGGSEIVLTQSPGTLSLSPGERATLSCRASQSVSNTYLAWYH |
| | | | | QRPGQAPRLLIYGASSRATGIPDRFSGSGSGTDFALTISSLEP |
| | | | | EDFAVYYCQQYSNSWTFGQGTKVEIK |
| 1151 | CDH19 4B10 x | artificial | | QVQLVESGGGVVQPGRSLRLSCAASGFTFSSYDMHWVRQAPGK |
| | I2C | | | GLEWVAVISYDGTNEYYADSVKGRFTISRDTSKNTLYLQMNSL |
| | | | | RAEDTAVYYCARERYFDWSFDYWGQGTLVSVSSGGGGSGGGGS |
| | | | | GGGGSEIVLTQSPGTLSLSPGERATLSCRASQSVSNTYLAWYH |
| | | | | QRPGQAPRLLIYGASSRATGIPDRFSGSGSGTDFALTISSLEP |
| | | | | EDFAVYYCQQYSNSWTFGQGTKVEIKSGGGGSEVQLVESGGGL |
| | | | | VQPGGSLKLSCAASGFTFNKYAMNWVRQAPGKGLEWVARIRSK |
| | | | | YNNYATYYADSVKDRFTISRDDSKNTAYLQMNNLKTEDTAVYY |
| | | | | CVRHGNFGNSYISYWAYWGQGTLVTVSSGGGGSGGGGSGGGGS |
| | | | | QTVVTQEPSLTVSPGGTVTLTCGSSTGAVTSGNYPNWVQQKPG |
| | | | | QAPRGLIGGTKFLAPGTPARFSGSLLGGKAALTLSGVQPEDEA |
| | | | | EYYCVLWYSNRWVFGGGTKLTVLHHHHHH |
| 1152 | CDR-H1 of | artificial | AA | SYDMD |
| | CDH19 4F3 | | | |
| 1153 | CDR-H2 of | artificial | AA | VIWYDGSNKYYADSVRG |
| | CDH19 4F3 | | | |
| 1154 | CDR-H3 of | artificial | AA | ETGEGWYFDL |
| | CDH19 4F3 | | | |
| 1155 | CDR-L1 of | artificial | AA | RASQSVSSSYLA |
| | CDH19 4F3 | | | |
| 1156 | CDR-L2 of | artificial | AA | GASSRAT |
| | CDH19 4F3 | | | |
| 1157 | CDR-L3 of | artificial | AA | QQYGSSWT |
| | CDH19 4F3 | | | |
| 1158 | VH of CDH19 | artificial | NT | CAGGTGCAGCTGGTGGAATCCGGCGGAGGCGTGGTGCAGCCTG |
| | 4F3 | | | GCCGGTCCCTGAGACTGTCTTGTGCCGCCTCCGGCTTCAGCTT |
| | | | | CTCCTCCTACGACATGGACTGGGTCCGACAGACCCCCGGCAAG |
| | | | | GGCCTGGAATGGGTGGCCGTGATTTGGTACGACGGCTCCAACA |
| | | | | AGTACTACGCCGACTCCGTGCGGGGCAGATTCACCATCTCCCG |
| | | | | GGACAACTCCAAGAACACCCTGTTTCTGCAGATGAACTCCCTG |
| | | | | CGGGTGGAAGATACCGCCGTGTACTACTGCGCCAGAGAGACAG |
| | | | | GCGAGGGCTGGTACTTCGACCTGTGGGGCAGAGGCACCCTGGT |
| | | | | CACCGTGTCTAGC |
| 1159 | VH of CDH19 | artificial | AA | QVQLVESGGGVVQPGRSLRLSCAASGFSFSSYDMDWVRQTPGK |
| | 4F3 | | | GLEWVAVIWYDGSNKYYADSVRGRFTISRDNSKNTLFLQMNSL |
| | | | | RVEDTAVYYCARETGEGWYFDLWGRGTLVTVSS |
| 1160 | VL of CDH19 | artificial | NT | GAGATCGTGCTGACCCAGTCCCCTGGCACCCTGTCCCTGAGCC |
| | 4F3 | | | CTGGCGAGAGAGCCACCCTGTCCTGCAGAGCCTCCCAGTCCGT |
| | | | | GTCCTCCTCCTACCTGGCCTGGTATCAGCAGAAGCCCGGCCAG |
| | | | | GCCCCTCGGCTGCTGATCTACGGCGCCTCTTCCAGAGCCACCG |
| | | | | GCATCCCTGACCGGTTCTCCGGCTCTGGCTCCGGCACCGACTT |
| | | | | CACCCTGACCATCAGCCGGCTGGAACCCGAGGACTTCGCTGTG |
| | | | | TACTATTGCCAGCAGTACGGCTCCTCCTGGACCTTCGGCCAGG |
| | | | | GCACCAAGGTGGAAATCAAG |
| 1161 | VL of CDH19 | artificial | AA | EIVLTQSPGTLSLSPGERATLSCRASQSVSSSYLAWYQQKPGQ |
| | 4F3 | | | APRLLIYGASSRATGIPDRFSGSGSGTDFTLTISRLEPEDFAV |
| | | | | YYCQQYGSSWTFGQGTKVEIK |
| 1162 | VH-VL of | artificial | NT | CAGGTGCAGCTGGTGGAATCCGGCGGAGGCGTGGTGCAGCCTG |
| | CDH19 4F3 | | | GCCGGTCCCTGAGACTGTCTTGTGCCGCCTCCGGCTTCAGCTT |
| | | | | CTCCTCCTACGACATGGACTGGGTCCGACAGACCCCCGGCAAG |
| | | | | GGCCTGGAATGGGTGGCCGTGATTTGGTACGACGGCTCCAACA |
| | | | | AGTACTACGCCGACTCCGTGCGGGGCAGATTCACCATCTCCCG |
| | | | | GGACAACTCCAAGAACACCCTGTTTCTGCAGATGAACTCCCTG |
| | | | | CGGGTGGAAGATACCGCCGTGTACTACTGCGCCAGAGAGACAG |
| | | | | GCGAGGGCTGGTACTTCGACCTGTGGGGCAGAGGCACCCTGGT |
| | | | | CACCGTGTCTAGCGGAGGCGGAGGATCTGGTGGCGGTGGTTCT |
| | | | | GGCGGCGGAGGCTCCGAGATCGTGCTGACCCAGTCCCCTGGCA |
| | | | | CCCTGTCCCTGAGCCCTGGCGAGAGAGCCACCCTGTCCTGCAG |
| | | | | AGCCTCCCAGTCCGTGTCCTCCTCCTACCTGGCCTGGTATCAG |
| | | | | CAGAAGCCCGGCCAGGCCCCTCGGCTGCTGATCTACGGCGCCT |
| | | | | CTTCCAGAGCCACCGGCATCCCTGACCGGTTCTCCGGCTCTGG |
| | | | | CTCCGGCACCGACTTCACCCTGACCATCAGCCGGCTGGAACCC |
| | | | | GAGGACTTCGCTGTGTACTATTGCCAGCAGTACGGCTCCTCCT |
| | | | | GGACCTTCGGCCAGGGCACCAAGGTGGAAATCAAG |
| 1163 | VH-VL of | artificial | AA | QVQLVESGGGVVQPGRSLRLSCAASGFSFSSYDMDWVRQTPGK |
| | CDH19 4F3 | | | GLEWVAVIWYDGSNKYYADSVRGRFTISRDNSKNTLFLQMNSL |
| | | | | RVEDTAVYYCARETGEGWYFDLWGRGTLVTVSSGGGGSGGGGS |
| | | | | GGGGSEIVLTQSPGTLSLSPGERATLSCRASQSVSSSYLAWYQ |
| | | | | QKPGQAPRLLIYGASSRATGIPDRFSGSGSGTDFTLTISRLEP |
| | | | | EDFAVYYCQQYGSSWTFGQGTKVEIK |
| 1164 | CDH19 4F3 x | artificial | | QVQLVESGGGVVQPGRSLRLSCAASGFSFSSYDMDWVRQTPGK |
| | I2C | | | GLEWVAVIWYDGSNKYYADSVRGRFTISRDNSKNTLFLQMNSL |
| | | | | RVEDTAVYYCARETGEGWYFDLWGRGTLVTVSSGGGGSGGGGS |
| | | | | GGGGSEIVLTQSPGTLSLSPGERATLSCRASQSVSSSYLAWYQ |
| | | | | QKPGQAPRLLIYGASSRATGIPDRFSGSGSGTDFTLTISRLEP |
| | | | | EDFAVYYCQQYGSSWTFGQGTKVEIKSGGGGSEVQLVESGGGL |
| | | | | VQPGGSLKLSCAASGFTFNKYAMNWVRQAPGKGLEWVARIRSK |
| | | | | YNNYATYYADSVKDRFTISRDDSKNTAYLQMNNLKTEDTAVYY |
| | | | | CVRHGNFGNSYISYWAYWGQGTLVTVSSGGGGSGGGGSGGGGS |
| | | | | QTVVTQEPSLTVSPGGTVTLTCGSSTGAVTSGNYPNWVQQKPG |
| | | | | QAPRGLIGGTKFLAPGTPARFSGSLLGGKAALTLSGVQPEDEA |
| | | | | EYYCVLWYSNRWVFGGGTKLTVLHHHHHH |
| 1165 | CDR-H1 of | artificial | AA | SYSWS |
| | CDH19 4F7 | | | |
| 1166 | CDR-H2 of | artificial | AA | YIYYSGSTNYNPSLKS |
| | CDH19 4F7 | | | |
| 1167 | CDR-H3 of | artificial | AA | NWAFHFDY |
| | CDH19 4F7 | | | |
| 1168 | CDR-L1 of | artificial | AA | TGSSSNIGTGYDVH |
| | CDH19 4F7 | | | |
| 1169 | CDR-L2 of | artificial | AA | GNSNRPS |
| | CDH19 4F7 | | | |
| 1170 | CDR-L3 of | artificial | AA | QSYDSSLSGWV |
| | CDH19 4F7 | | | |
| 1171 | VH of CDH19 | artificial | NT | CAGGTGCAGCTGCAGGAATCCGGCCCTGGCCTGGTCAAGCCCT |
| | 4F7 | | | CCGAGACACTGTCCCTGACCTGCACCGTGTCCGGCGGCTCCAT |
| | | | | CTCCTCCTACTCTTGGTCCTGGATCCGGCAGCCCCCTGGCAAG |
| | | | | GGCCTGGAATGGATCGGCTACATCTACTACTCCGGCTCCACCA |
| | | | | ACTACAACCCCAGCCTGAAGTCCAGAGTGACCATCTCCCTGGA |
| | | | | CACCTCCAAGAACCAGTTCTCCCTGAAGCTGTCCTCCGTGACC |
| | | | | GCCGCTGACACCGCCGTGTACTACTGCGCCCGGAACTGGGCCT |
| | | | | TCCACTTCGACTACTGGGGCCAGGGCACCCTGGTCACCGTGTC |
| | | | | TAGC |
| 1172 | VH of CDH19 | artificial | AA | QVQLQESGPGLVKPSETLSLTCTVSGGSISSYSWSWIRQPPGK |
| | 4F7 | | | GLEWIGYIYYSGSTNYNPSLKSRVTISLDTSKNQFSLKLSSVT |
| | | | | AADTAVYYCARNWAFHFDYWGQGTLVTVSS |
| 1173 | VL of CDH19 | artificial | NT | CAGTCTGTGCTGACCCAGCCTCCCTCTGTGTCTGGCGCCCCTG |
| | 4F7 | | | GCCAGCGCGTGACCATTTCCTGCACCGGCTCCTCCAGCAACAT |
| | | | | CGGCACCGGCTACGACGTGCACTGGTATCAGCAGCTGCCCGGC |
| | | | | ACCGCCCCCAAGCTGCTGATCCACGGCAACTCCAACCGGCCCT |
| | | | | CCGGCGTGCCCGACCGGTTCTCTGGCTCCAAGTCTGGCACCTC |
| | | | | CGCCTCCCTGGCTATCACCGGCCTGCAGGCTGAGGACGAGGCC |
| | | | | GACTACTACTGCCAGTCCTACGACTCCTCCCTGTCCGGCTGGG |
| | | | | TGTTCGGCGGAGGCACCAGACTGACCGTGCTG |
| 1174 | VL of CDH19 | artificial | AA | QSVLTQPPSVSGAPGQRVTISCTGSSSNIGTGYDVHWYQQLPG |
| | 4F7 | | | TAPKLLIHGNSNRPSGVPDRFSGSKSGTSASLAITGLQAEDEA |
| | | | | DYYCQSYDSSLSGWVFGGGTRLTVL |
| 1175 | VH-VL of | artificial | NT | CAGGTGCAGCTGCAGGAATCCGGCCCTGGCCTGGTCAAGCCCT |
| | CDH19 4F7 | | | CCGAGACACTGTCCCTGACCTGCACCGTGTCCGGCGGCTCCAT |
| | | | | CTCCTCCTACTCTTGGTCCTGGATCCGGCAGCCCCCTGGCAAG |
| | | | | GGCCTGGAATGGATCGGCTACATCTACTACTCCGGCTCCACCA |
| | | | | ACTACAACCCCAGCCTGAAGTCCAGAGTGACCATCTCCCTGGA |
| | | | | CACCTCCAAGAACCAGTTCTCCCTGAAGCTGTCCTCCGTGACC |
| | | | | GCCGCTGACACCGCCGTGTACTACTGCGCCCGGAACTGGGCCT |
| | | | | TCCACTTCGACTACTGGGGCCAGGGCACCCTGGTCACCGTGTC |
| | | | | TAGCGGAGGCGGAGGATCTGGTGGCGGTGGTTCTGGCGGCGGA |
| | | | | GGCTCCCAGTCTGTGCTGACCCAGCCTCCCTCTGTGTCTGGCG |
| | | | | CCCCTGGCCAGCGCGTGACCATTTCCTGCACCGGCTCCTCCAG |
| | | | | CAACATCGGCACCGGCTACGACGTGCACTGGTATCAGCAGCTG |
| | | | | CCCGGCACCGCCCCCAAGCTGCTGATCCACGGCAACTCCAACC |
| | | | | GGCCCTCCGGCGTGCCCGACCGGTTCTCTGGCTCCAAGTCTGG |
| | | | | CACCTCCGCCTCCCTGGCTATCACCGGCCTGCAGGCTGAGGAC |
| | | | | GAGGCCGACTACTACTGCCAGTCCTACGACTCCTCCCTGTCCG |
| | | | | GCTGGGTGTTCGGCGGAGGCACCAGACTGACCGTGCTG |
| 1176 | VH-VL of | artificial | AA | QVQLQESGPGLVKPSETLSLTCTVSGGSISSYSWSWIRQPPGK |
| | CDH19 4F7 | | | GLEWIGYIYYSGSTNYNPSLKSRVTISLDTSKNQFSLKLSSVT |
| | | | | AADTAVYYCARNWAFHFDYWGQGTLVTVSSGGGGSGGGGSGGG |
| | | | | GSQSVLTQPPSVSGAPGQRVTISCTGSSSNIGTGYDVHWYQQL |
| | | | | PGTAPKLLIHGNSNRPSGVPDRFSGSKSGTSASLAITGLQAED |
| | | | | EADYYCQSYDSSLSGWVFGGGTRLTVL |
| 1177 | CDH19 4F7 x | artificial | | QVQLQESGPGLVKPSETLSLTCTVSGGSISSYSWSWIRQPPGK |
| | I2C | | | GLEWIGYIYYSGSTNYNPSLKSRVTISLDTSKNQFSLKLSSVT |
| | | | | AADTAVYYCARNWAFHFDYWGQGTLVTVSSGGGGSGGGGSGGG |
| | | | | GSQSVLTQPPSVSGAPGQRVTISCTGSSSNIGTGYDVHWYQQL |
| | | | | PGTAPKLLIHGNSNRPSGVPDRFSGSKSGTSASLAITGLQAED |
| | | | | EADYYCQSYDSSLSGWVFGGGTRLTVLSGGGGSEVQLVESGGG |
| | | | | LVQPGGSLKLSCAASGFTFNKYAMNWVRQAPGKGLEWVARIRS |
| | | | | KYNNYATYYADSVKDRFTISRDDSKNTAYLQMNNLKTEDTAVY |
| | | | | YCVRHGNFGNSYISYWAYWGQGTLVTVSSGGGGSGGGGSGGGG |
| | | | | SQTVVTQEPSLTVSPGGTVTLTCGSSTGAVTSGNYPNWVQQKP |
| | | | | GQAPRGLIGGTKFLAPGTPARFSGSLLGGKAALTLSGVQPEDE |
| | | | | AEYYCVLWYSNRWVFGGGTKLTVLHHHHHH |
| 1178 | CDR-H1 of | artificial | AA | SYGMH |
| | CDH19 14039 | | | |
| 1179 | CDR-H2 of | artificial | AA | FIWYEGSNKYYAESVKD |
| | CDH19 14039 | | | |
| 1180 | CDR-H3 of | artificial | AA | RAGIIGTIGYYYGMDV |
| | CDH19 14039 | | | |
| 1181 | CDR-L1 of | artificial | AA | SGDRLGEKYTS |
| | CDH19 14039 | | | |
| 1182 | CDR-L2 of | artificial | AA | QDTKRPS |
| | CDH19 14039 | | | |
| 1183 | CDR-L3 of | artificial | AA | QAWESSTVV |
| | CDH19 14039 | | | |
| 1184 | VH of CDH19 | artificial | NT | CAGGTGCAGTTGGTGGAGTCTGGGGGAGGCGTGGTCCAGCCTG |
| | 14039 | | | GGGGGTCCCTGAGACTCTCCTGTGCAGCGTCTGGATTCACCTT |
| | | | | CAGTAGCTATGGCATGCACTGGGTCCGCCAGGCTCCAGGCAAG |
| | | | | GGGCTGGAGTGGGTGGCATTTATATGGTATGAGGGAAGTAATA |
| | | | | AATACTATGCAGAGTCCGTGAAGGACCGATTCACCATCTCCAG |
| | | | | AGACAATTCCAAGAACACGCTGTATCTGCAAATGAATAGCCTG |
| | | | | AGAGCTGAGGACACGGCTGTGTATTACTGTGCGAGAAGGGCCG |
| | | | | GTATAATAGGAACTATAGGCTACTACTACGGTATGGACGTCTG |
| | | | | GGGCCAAGGGACCACGGTCACCGTCTCTAGT |
| 1185 | VH of CDH19 | artificial | AA | QVQLVESGGGVVQPGGSLRLSCAASGFTFSSYGMHWVRQAPGK |
| | 14039 | | | GLEWVAFIWYEGSNKYYAESVKDRFTISRDNSKNTLYLQMNSL |
| | | | | RAEDTAVYYCARRAGIIGTIGYYYGMDVWGQGTTVTVSS |
| 1186 | VL of CDH19 | artificial | NT | TCCTATGAACTGACTCAGCCACCCTCAGTGTCCGTGTCCCCAG |
| | 14039 | | | GACAGACAGCCAGCATCACCTGCTCTGGAGATAGGTTGGGGGA |
| | | | | AAAATATACTAGCTGGTATCAGCAGAGGCCAGGCCAGTCCCCT |
| | | | | TTGCTGGTCATCTATCAAGATACCAAGCGGCCCTCAGGGATCC |
| | | | | CTGAGCGATTCTCTGGCTCCAACTCTGGTAACACAGCCACTCT |
| | | | | GACCATCAGCGGGACCCAGGCTATGGATGAGGCTGACTATTAC |
| | | | | TGTCAGGCGTGGGAGAGCAGCACTGTGGTATTCGGCGGAGGGA |
| | | | | CCAAGCTGACCGTCCTA |
| 1187 | VL of CDH19 | artificial | AA | SYELTQPPSVSVSPGQTASITCSGDRLGEKYTSWYQQRPGQSP |
| | 14039 | | | LLVIYQDTKRPSGIPERFSGSNSGNTATLTISGTQAMDEADYY |
| | | | | CQAWESSTVVFGGGTKLTVL |
| 1188 | VH-VL of | artificial | NT | CAGGTGCAGTTGGTGGAGTCTGGGGGAGGCGTGGTCCAGCCTG |
| | CDH19 14039 | | | GGGGGTCCCTGAGACTCTCCTGTGCAGCGTCTGGATTCACCTT |
| | | | | CAGTAGCTATGGCATGCACTGGGTCCGCCAGGCTCCAGGCAAG |
| | | | | GGGCTGGAGTGGGTGGCATTTATATGGTATGAGGGAAGTAATA |
| | | | | AATACTATGCAGAGTCCGTGAAGGACCGATTCACCATCTCCAG |
| | | | | AGACAATTCCAAGAACACGCTGTATCTGCAAATGAATAGCCTG |
| | | | | AGAGCTGAGGACACGGCTGTGTATTACTGTGCGAGAAGGGCCG |
| | | | | GTATAATAGGAACTATAGGCTACTACTACGGTATGGACGTCTG |
| | | | | GGGCCAAGGGACCACGGTCACCGTCTCTAGTGGTGGCGGAGGA |
| | | | | TCTGGCGGAGGTGGAAGCGGAGGCGGCGGATCTTCCTATGAAC |
| | | | | TGACTCAGCCACCCTCAGTGTCCGTGTCCCCAGGACAGACAGC |
| | | | | CAGCATCACCTGCTCTGGAGATAGGTTGGGGGAAAAATATACT |
| | | | | AGCTGGTATCAGCAGAGGCCAGGCCAGTCCCCTTTGCTGGTCA |
| | | | | TCTATCAAGATACCAAGCGGCCCTCAGGGATCCCTGAGCGATT |
| | | | | CTCTGGCTCCAACTCTGGTAACACAGCCACTCTGACCATCAGC |
| | | | | GGGACCCAGGCTATGGATGAGGCTGACTATTACTGTCAGGCGT |
| | | | | GGGAGAGCAGCACTGTGGTATTCGGCGGAGGGACCAAGCTGAC |
| | | | | CGTCCTA |
| 1189 | VH-VL of | artificial | AA | QVQLVESGGGVVQPGGSLRLSCAASGFTFSSYGMHWVRQAPGK |
| | CDH19 14039 | | | GLEWVAFIWYEGSNKYYAESVKDRFTISRDNSKNTLYLQMNSL |
| | | | | RAEDTAVYYCARRAGIIGTIGYYYGMDVWGQGTTVTVSSGGGG |
| | | | | SGGGGSGGGGSSYELTQPPSVSVSPGQTASITCSGDRLGEKYT |
| | | | | SWYQQRPGQSPLLVIYQDTKRPSGIPERFSGSNSGNTATLTIS |
| | | | | GTQAMDEADYYCQAWESSTVVFGGGTKLTVL |
| 1190 | CDH19 14039 | artificial | | QVQLVESGGGVVQPGGSLRLSCAASGFTFSSYGMHWVRQAPGK |
| | x I2C | | | GLEWVAFIWYEGSNKYYAESVKDRFTISRDNSKNTLYLQMNSL |
| | | | | RAEDTAVYYCARRAGIIGTIGYYYGMDVWGQGTTVTVSSGGGG |
| | | | | SGGGGSGGGGSSYELTQPPSVSVSPGQTASITCSGDRLGEKYT |
| | | | | SWYQQRPGQSPLLVIYQDTKRPSGIPERFSGSNSGNTATLTIS |
| | | | | GTQAMDEADYYCQAWESSTVVFGGGTKLTVLSGGGGSEVQLVE |
| | | | | SGGGLVQPGGSLKLSCAASGFTFNKYAMNWVRQAPGKGLEWVA |
| | | | | RIRSKYNNYATYYADSVKDRFTISRDDSKNTAYLQMNNLKTED |
| | | | | TAVYYCVRHGNFGNSYISYWAYWGQGTLVTVSSGGGGSGGGGS |
| | | | | GGGGSQTVVTQEPSLTVSPGGTVTLTCGSSTGAVTSGNYPNWV |
| | | | | QQKPGQAPRGLIGGTKFLAPGTPARFSGSLLGGKAALTLSGVQ |
| | | | | PEDEAEYYCVLWYSNRWVFGGGTKLTVLHHHHHH |
| 1191 | CDR-H1 of | artificial | AA | SYGMH |
| | CDH19 14304 | | | |
| 1192 | CDR-H2 of | artificial | AA | FIWYDGSNKYYADSVKD |
| | CDH19 14304 | | | |
| 1193 | CDR-H3 of | artificial | AA | RAGIIGTIGYYYGMDV |
| | CDH19 14304 | | | |
| 1194 | CDR-L1 of | artificial | AA | SGDRLGEKYVS |
| | CDH19 14304 | | | |
| 1195 | CDR-L2 of | artificial | AA | QDNKWPS |
| | CDH19 14304 | | | |
| 1196 | CDR-L3 of | artificial | AA | QAWDSSTVV |
| | CDH19 14304 | | | |
| 1197 | VH of CDH19 | artificial | NT | CAGGTGCAGTTGGTGGAGTCTGGGGGAGGCGTGGTCCAGCCTG |
| | 14304 | | | GGGGGTCCCTGAGACTCTCCTGTGCAGCGTCTGGATTCACCTT |
| | | | | CAGTAGCTATGGCATGCACTGGGTCCGCCAGGCTCCAGGCAAG |
| | | | | GGGCTGGAGTGGGTGGCATTTATATGGTATGATGGAAGTAATA |
| | | | | AATACTATGCAGACTCCGTGAAGGACCGATTCACCATCTCCAG |
| | | | | AGACAATTCCAAGAACACGCTGTATCTGCAAATGAAAAGCCTG |
| | | | | AGAGCTGAGGACACGGCTGTGTATTACTGTGCGAGAAGGGCCG |
| | | | | GTATAATAGGAACTATAGGCTACTACTACGGTATGGACGTCTG |
| | | | | GGGCCAAGGGACCACGGTCACCGTCTCTAGT |
| 1198 | VH of CDH19 | artificial | AA | QVQLVESGGGVVQPGGSLRLSCAASGFTFSSYGMHWVRQAPGK |
| | 14304 | | | GLEWVAFIWYDGSNKYYADSVKDRFTISRDNSKNTLYLQMKSL |
| | | | | RAEDTAVYYCARRAGIIGTIGYYYGMDVWGQGTTVTVSS |
| 1199 | VL of CDH19 | artificial | NT | TCCTATGAGCTGACTCAGCCACCCTCAGTGTCCGTGTCCCCAG |
| | 14304 | | | GACAGACAGCCAGCATCACCTGCTCTGGAGATAGATTGGGGGA |
| | | | | GAAATATGTTAGCTGGTATCAGCAGAAGCCAGGCCAGTCCCCT |
| | | | | ATACTGGTCATCTATCAAGATAATAAGTGGCCCTCAGGGATCC |
| | | | | CTGAGCGATTCTCTGGCTCCAACTCTGGGAACACAGCCACTCT |
| | | | | GACCATCAGCGGGACCCAGGCTATGGATGAGGCTGACTATTAC |
| | | | | TGTCAGGCGTGGGACAGCAGCACTGTGGTATTCGGCGGGGGGA |
| | | | | CCAAGCTGACCGTCCTA |
| 1200 | VL of CDH19 | artificial | AA | SYELTQPPSVSVSPGQTASITCSGDRLGEKYVSWYQQKPGQSP |
| | 14304 | | | ILVIYQDNKWPSGIPERFSGSNSGNTATLTISGTQAMDEADYY |
| | | | | CQAWDSSTVVFGGGTKLTVL |
| 1201 | VH-VL of | artificial | NT | CAGGTGCAGTTGGTGGAGTCTGGGGGAGGCGTGGTCCAGCCTG |
| | CDH19 14304 | | | GGGGGTCCCTGAGACTCTCCTGTGCAGCGTCTGGATTCACCTT |
| | | | | CAGTAGCTATGGCATGCACTGGGTCCGCCAGGCTCCAGGCAAG |
| | | | | GGGCTGGAGTGGGTGGCATTTATATGGTATGATGGAAGTAATA |
| | | | | AATACTATGCAGACTCCGTGAAGGACCGATTCACCATCTCCAG |
| | | | | AGACAATTCCAAGAACACGCTGTATCTGCAAATGAAAAGCCTG |
| | | | | AGAGCTGAGGACACGGCTGTGTATTACTGTGCGAGAAGGGCCG |
| | | | | GTATAATAGGAACTATAGGCTACTACTACGGTATGGACGTCTG |
| | | | | GGGCCAAGGGACCACGGTCACCGTCTCTAGTGGTGGCGGAGGA |
| | | | | TCTGGCGGAGGTGGAAGCGGAGGCGGCGGATCTTCCTATGAGC |
| | | | | TGACTCAGCCACCCTCAGTGTCCGTGTCCCCAGGACAGACAGC |
| | | | | CAGCATCACCTGCTCTGGAGATAGATTGGGGGAGAAATATGTT |
| | | | | AGCTGGTATCAGCAGAAGCCAGGCCAGTCCCCTATACTGGTCA |
| | | | | TCTATCAAGATAATAAGTGGCCCTCAGGGATCCCTGAGCGATT |
| | | | | CTCTGGCTCCAACTCTGGGAACACAGCCACTCTGACCATCAGC |
| | | | | GGGACCCAGGCTATGGATGAGGCTGACTATTACTGTCAGGCGT |
| | | | | GGGACAGCAGCACTGTGGTATTCGGCGGGGGGACCAAGCTGAC |
| | | | | CGTCCTA |
| 1202 | VH-VL of | artificial | AA | QVQLVESGGGVVQPGGSLRLSCAASGFTFSSYGMHWVRQAPGK |
| | CDH19 14304 | | | GLEWVAFIWYDGSNKYYADSVKDRFTISRDNSKNTLYLQMKSL |
| | | | | RAEDTAVYYCARRAGIIGTIGYYYGMDVWGQGTTVTVSSGGGG |
| | | | | SGGGGSGGGGSSYELTQPPSVSVSPGQTASITCSGDRLGEKYV |
| | | | | SWYQQKPGQSPILVIYQDNKWPSGIPERFSGSNSGNTATLTIS |
| | | | | GTQAMDEADYYCQAWDSSTVVFGGGTKLTVL |
| 1203 | CDH19 14304 | artificial | | QVQLVESGGGVVQPGGSLRLSCAASGFTFSSYGMHWVRQAPGK |
| | x I2C | | | GLEWVAFIWYDGSNKYYADSVKDRFTISRDNSKNTLYLQMKSL |
| | | | | RAEDTAVYYCARRAGIIGTIGYYYGMDVWGQGTTVTVSSGGGG |
| | | | | SGGGGSGGGGSSYELTQPPSVSVSPGQTASITCSGDRLGEKYV |
| | | | | SWYQQKPGQSPILVIYQDNKWPSGIPERFSGSNSGNTATLTIS |
| | | | | GTQAMDEADYYCQAWDSSTVVFGGGTKLTVLSGGGGSEVQLVE |
| | | | | SGGGLVQPGGSLKLSCAASGFTFNKYAMNWVRQAPGKGLEWVA |
| | | | | RIRSKYNNYATYYADSVKDRFTISRDDSKNTAYLQMNNLKTED |
| | | | | TAVYYCVRHGNFGNSYISYWAYWGQGTLVTVSSGGGGSGGGGS |
| | | | | GGGGSQTVVTQEPSLTVSPGGTVTLTCGSSTGAVTSGNYPNWV |
| | | | | QQKPGQAPRGLIGGTKFLAPGTPARFSGSLLGGKAALTLSGVQ |
| | | | | PEDEAEYYCVLWYSNRWVFGGGTKLTVLHHHHHH |
| 1204 | CDR-H1 of | artificial | AA | SYGMH |
| | CDH19 14301 | | | |
| 1205 | CDR-H2 of | artificial | AA | FIWYDGSNKYYADSVKD |
| | CDH19 14301 | | | |
| 1206 | CDR-H3 of | artificial | AA | RAGIIGTIGYYYGMDV |
| | CDH19 14301 | | | |
| 1207 | CDR-L1 of | artificial | AA | SGDRLGEKYTC |
| | CDH19 14301 | | | |
| 1208 | CDR-L2 of | artificial | AA | QDTKRPS |
| | CDH19 14301 | | | |
| 1209 | CDR-L3 of | artificial | AA | QAWESSTVV |
| | CDH19 14301 | | | |
| 1210 | VH of CDH19 | artificial | NT | CAGGTGCAGTTGGTGGAGTCTGGGGGAGGCGTGGTCCAGCCTG |
| | 14301 | | | GGAGGTCCCTGAGACTCTCCTGTGCAGCGTCTGGATTCACCTT |
| | | | | CAGTAGCTATGGCATGCACTGGGTCCGCCAGGCTCCAGGCAAG |
| | | | | GGGCTGGAGTGGGTGGCATTTATATGGTATGATGGAAGTAATA |
| | | | | AATACTATGCAGACTCCGTGAAGGACCGATTCACCATCTCCAG |
| | | | | AGACAATTCCAAGAACACGCTGTATCTGCAAATGAAAAGCCTG |
| | | | | AGAGCTGAGGACACGGCTGTGTATTACTGTGCGAGAAGGGCCG |
| | | | | GTATAATAGGAACTATAGGCTACTACTACGGTATGGACGTCTG |
| | | | | GGGCCAAGGGACCACGGTCACCGTCTCTAGT |
| 1211 | VH of CDH19 | artificial | AA | QVQLVESGGGVVQPGRSLRLSCAASGFTFSSYGMHWVRQAPGK |
| | 14301 | | | GLEWVAFIWYDGSNKYYADSVKDRFTISRDNSKNTLYLQMKSL |
| | | | | RAEDTAVYYCARRAGIIGTIGYYYGMDVWGQGTTVTVSS |
| 1212 | VL of CDH19 | artificial | NT | TCCTATGAACTGACTCAGCCACCCTCAGTGTCCGTGTCCCCAG |
| | 14301 | | | GACAGACAGCCAGCATCACCTGCTCTGGAGATAGGTTGGGGGA |
| | | | | AAAATATACTTGCTGGTATCAGCAGAGGCCAGGCCAGTCCCCT |
| | | | | TTGCTGGTCATCTATCAAGATACCAAGCGGCCCTCAGGGATCC |
| | | | | CTGAGCGATTCTCTGGCTCCAACTCTGGTAACACAGCCACTCT |
| | | | | GACCATCAGCGGGACCCAGGCTATGGATGAGGCTGACTATTAC |
| | | | | TGTCAGGCGTGGGAGAGCAGCACTGTGGTATTCGGCGGAGGGA |
| | | | | CCAAGCTGACCGTCCTA |
| 1213 | VL of CDH19 | artificial | AA | SYELTQPPSVSVSPGQTASITCSGDRLGEKYTCWYQQRPGQSP |
| | 14301 | | | LLVIYQDTKRPSGIPERFSGSNSGNTATLTISGTQAMDEADYY |
| | | | | CQAWESSTVVFGGGTKLTVL |
| 1214 | VH-VL of | artificial | NT | CAGGTGCAGTTGGTGGAGTCTGGGGGAGGCGTGGTCCAGCCTG |
| | CDH19 14301 | | | GGAGGTCCCTGAGACTCTCCTGTGCAGCGTCTGGATTCACCTT |
| | | | | CAGTAGCTATGGCATGCACTGGGTCCGCCAGGCTCCAGGCAAG |
| | | | | GGGCTGGAGTGGGTGGCATTTATATGGTATGATGGAAGTAATA |
| | | | | AATACTATGCAGACTCCGTGAAGGACCGATTCACCATCTCCAG |
| | | | | AGACAATTCCAAGAACACGCTGTATCTGCAAATGAAAAGCCTG |
| | | | | AGAGCTGAGGACACGGCTGTGTATTACTGTGCGAGAAGGGCCG |
| | | | | GTATAATAGGAACTATAGGCTACTACTACGGTATGGACGTCTG |
| | | | | GGGCCAAGGGACCACGGTCACCGTCTCTAGTGGTGGCGGAGGA |
| | | | | TCTGGCGGAGGTGGAAGCGGAGGCGGCGGATCTTCCTATGAAC |
| | | | | TGACTCAGCCACCCTCAGTGTCCGTGTCCCCAGGACAGACAGC |
| | | | | CAGCATCACCTGCTCTGGAGATAGGTTGGGGGAAAAATATACT |
| | | | | TGCTGGTATCAGCAGAGGCCAGGCCAGTCCCCTTTGCTGGTCA |
| | | | | TCTATCAAGATACCAAGCGGCCCTCAGGGATCCCTGAGCGATT |
| | | | | CTCTGGCTCCAACTCTGGTAACACAGCCACTCTGACCATCAGC |
| | | | | GGGACCCAGGCTATGGATGAGGCTGACTATTACTGTCAGGCGT |
| | | | | GGGAGAGCAGCACTGTGGTATTCGGCGGAGGGACCAAGCTGAC |
| | | | | CGTCCTA |
| 1215 | VH-VL of | artificial | AA | QVQLVESGGGVVQPGRSLRLSCAASGFTFSSYGMHWVRQAPGK |
| | CDH19 14301 | | | GLEWVAFIWYDGSNKYYADSVKDRFTISRDNSKNTLYLQMKSL |
| | | | | RAEDTAVYYCARRAGIIGTIGYYYGMDVWGQGTTVTVSSGGGG |
| | | | | SGGGGSGGGGSSYELTQPPSVSVSPGQTASITCSGDRLGEKYT |
| | | | | CWYQQRPGQSPLLVIYQDTKRPSGIPERFSGSNSGNTATLTIS |
| | | | | GTQAMDEADYYCQAWESSTVVFGGGTKLTVL |
| 1216 | CDH19 14301 | artificial | | QVQLVESGGGVVQPGRSLRLSCAASGFTFSSYGMHWVRQAPGK |
| | x I2C | | | GLEWVAFIWYDGSNKYYADSVKDRFTISRDNSKNTLYLQMKSL |
| | | | | RAEDTAVYYCARRAGIIGTIGYYYGMDVWGQGTTVTVSSGGGG |
| | | | | SGGGGSGGGGSSYELTQPPSVSVSPGQTASITCSGDRLGEKYT |
| | | | | CWYQQRPGQSPLLVIYQDTKRPSGIPERFSGSNSGNTATLTIS |
| | | | | GTQAMDEADYYCQAWESSTVVFGGGTKLTVLSGGGGSEVQLVE |
| | | | | SGGGLVQPGGSLKLSCAASGFTFNKYAMNWVRQAPGKGLEWVA |
| | | | | RIRSKYNNYATYYADSVKDRFTISRDDSKNTAYLQMNNLKTED |
| | | | | TAVYYCVRHGNFGNSYISYWAYWGQGTLVTVSSGGGGSGGGGS |
| | | | | GGGGSQTVVTQEPSLTVSPGGTVTLTCGSSTGAVTSGNYPNWV |
| | | | | QQKPGQAPRGLIGGTKFLAPGTPARFSGSLLGGKAALTLSGVQ |
| | | | | PEDEAEYYCVLWYSNRWVFGGGTKLTVLHHHHHH |
| 1217 | CDR-H1 of | artificial | AA | RYGIH |
| | CDH19 14079 | | | |
| 1218 | CDR-H2 of | artificial | AA | VIWYEGSNKYYAESVKG |
| | CDH19 14079 | | | |
| 1219 | CDR-H3 of | artificial | AA | RAGIPGTTGYYYGMDV |
| | CDH19 14079 | | | |
| 1220 | CDR-L1 of | artificial | AA | SGDRLGEKYVS |
| | CDH19 14079 | | | |
| 1221 | CDR-L2 of | artificial | AA | QDNKWPS |
| | CDH19 14079 | | | |
| 1222 | CDR-L3 of | artificial | AA | QAWESSTVV |
| | CDH19 14079 | | | |
| 1223 | VH of CDH19 | artificial | NT | CAGGTGCAGCTGGTGGAGTCTGGGGGAGGCGTGGTCCAGCCTG |
| | 14079 | | | GGGGGTCCCTGAGACTCTCCTGTGCAGCGTCTGGATTCACCTT |
| | | | | CAGTCGCTATGGCATACACTGGGTCCGCCAGGCTCCAGGCAAG |
| | | | | GGGCTGGAGTGGGTGGCAGTTATATGGTATGAGGGAAGTAATA |
| | | | | AATACTATGCAGAGTCCGTGAAGGGCCGATTCACCATCTCCAG |
| | | | | AGACAATTCCAAGAACACGCTGTATCTGCAAATGAACAGCCTG |
| | | | | AGAGCCGAGGACTCGGCTGTGTATTACTGTGCGAGAAGGGCCG |
| | | | | GTATACCTGGAACTACGGGCTACTACTATGGTATGGACGTCTG |
| | | | | GGGCCAAGGGACCACGGTCACCGTCTCCTCA |
| 1224 | VH of CDH19 | artificial | AA | QVQLVESGGGVVQPGGSLRLSCAASGFTFSRYGIHWVRQAPGK |
| | 14079 | | | GLEWVAVIWYEGSNKYYAESVKGRFTISRDNSKNTLYLQMNSL |
| | | | | RAEDSAVYYCARRAGIPGTTGYYYGMDVWGQGTTVTVSS |
| 1225 | VL of CDH19 | artificial | NT | TCCTATGAGCTGACTCAGCCACCCTCAGTGTCCGTGTCCCCAG |
| | 14079 | | | GACAGACAGCCAGCATCACCTGCTCTGGAGATAGATTGGGGGA |
| | | | | GAAATATGTTAGCTGGTATCAGCAGAAGCCAGGCCAGTCCCCT |
| | | | | ATACTGGTCATCTATCAAGATAATAAGTGGCCCTCAGGGATCC |
| | | | | CTGAGCGATTCTCTGGCTCCAACTCTGGGAACACAGCCACTCT |
| | | | | GACCATCAGCGGGACCCAGGCTATGGATGAGGCTGACTATTAC |
| | | | | TGTCAGGCGTGGGAGAGCAGCACTGTGGTATTCGGCGGGGGGA |
| | | | | CCAAGCTGACCGTCCTA |
| 1226 | VL of CDH19 | artificial | AA | SYELTQPPSVSVSPGQTASITCSGDRLGEKYVSWYQQKPGQSP |
| | 14079 | | | ILVIYQDNKWPSGIPERFSGSNSGNTATLTISGTQAMDEADYY |
| | | | | CQAWESSTVVFGGGTKLTVL |
| 1227 | VH-VL of | artificial | NT | CAGGTGCAGCTGGTGGAGTCTGGGGGAGGCGTGGTCCAGCCTG |
| | CDH19 14079 | | | GGGGGTCCCTGAGACTCTCCTGTGCAGCGTCTGGATTCACCTT |
| | | | | CAGTCGCTATGGCATACACTGGGTCCGCCAGGCTCCAGGCAAG |
| | | | | GGGCTGGAGTGGGTGGCAGTTATATGGTATGAGGGAAGTAATA |
| | | | | AATACTATGCAGAGTCCGTGAAGGGCCGATTCACCATCTCCAG |
| | | | | AGACAATTCCAAGAACACGCTGTATCTGCAAATGAACAGCCTG |
| | | | | AGAGCCGAGGACTCGGCTGTGTATTACTGTGCGAGAAGGGCCG |
| | | | | GTATACCTGGAACTACGGGCTACTACTATGGTATGGACGTCTG |
| | | | | GGGCCAAGGGACCACGGTCACCGTCTCCTCAGGTGGCGGAGGA |
| | | | | TCTGGCGGAGGTGGAAGCGGAGGCGGCGGATCTTCCTATGAGC |
| | | | | TGACTCAGCCACCCTCAGTGTCCGTGTCCCCAGGACAGACAGC |
| | | | | CAGCATCACCTGCTCTGGAGATAGATTGGGGGAGAAATATGTT |
| | | | | AGCTGGTATCAGCAGAAGCCAGGCCAGTCCCCTATACTGGTCA |
| | | | | TCTATCAAGATAATAAGTGGCCCTCAGGGATCCCTGAGCGATT |
| | | | | CTCTGGCTCCAACTCTGGGAACACAGCCACTCTGACCATCAGC |
| | | | | GGGACCCAGGCTATGGATGAGGCTGACTATTACTGTCAGGCGT |
| | | | | GGGAGAGCAGCACTGTGGTATTCGGCGGGGGGACCAAGCTGAC |
| | | | | CGTCCTA |
| 1228 | VH-VL of | artificial | AA | QVQLVESGGGVVQPGGSLRLSCAASGFTFSRYGIHWVRQAPGK |
| | CDH19 14079 | | | GLEWVAVIWYEGSNKYYAESVKGRFTISRDNSKNTLYLQMNSL |
| | | | | RAEDSAVYYCARRAGIPGTTGYYYGMDVWGQGTTVTVSSGGGG |
| | | | | SGGGGSGGGGSSYELTQPPSVSVSPGQTASITCSGDRLGEKYV |
| | | | | SWYQQKPGQSPILVIYQDNKWPSGIPERFSGSNSGNTATLTIS |
| | | | | GTQAMDEADYYCQAWESSTVVFGGGTKLTVL |
| 1229 | CDH19 14079 | artificial | | QVQLVESGGGVVQPGGSLRLSCAASGFTFSRYGIHWVRQAPGK |
| | x I2C | | | GLEWVAVIWYEGSNKYYAESVKGRFTISRDNSKNTLYLQMNSL |
| | | | | RAEDSAVYYCARRAGIPGTTGYYYGMDVWGQGTTVTVSSGGGG |
| | | | | SGGGGSGGGGSSYELTQPPSVSVSPGQTASITCSGDRLGEKYV |
| | | | | SWYQQKPGQSPILVIYQDNKWPSGIPERFSGSNSGNTATLTIS |
| | | | | GTQAMDEADYYCQAWESSTVVFGGGTKLTVLSGGGGSEVQLVE |
| | | | | SGGGLVQPGGSLKLSCAASGFTFNKYAMNWVRQAPGKGLEWVA |
| | | | | RIRSKYNNYATYYADSVKDRFTISRDDSKNTAYLQMNNLKTED |
| | | | | TAVYYCVRHGNFGNSYISYWAYWGQGTLVTVSSGGGGSGGGGS |
| | | | | GGGGSQTVVTQEPSLTVSPGGTVTLTCGSSTGAVTSGNYPNWV |
| | | | | QQKPGQAPRGLIGGTKFLAPGTPARFSGSLLGGKAALTLSGVQ |
| | | | | PEDEAEYYCVLWYSNRWVFGGGTKLTVLHHHHHH |
| 1230 | CDR-H1 of | artificial | AA | RYGIH |
| | CDH19 14077 | | | |
| 1231 | CDR-H2 of | artificial | AA | VIWYDGSNKYYADSVKG |
| | CDH19 14077 | | | |
| 1232 | CDR-H3 of | artificial | AA | RAGIPGTTGYYYGMDV |
| | CDH19 14077 | | | |
| 1233 | CDR-L1 of | artificial | AA | SGDRLGEKYVS |
| | CDH19 14077 | | | |
| 1234 | CDR-L2 of | artificial | AA | QDNKWPS |
| | CDH19 14077 | | | |
| 1235 | CDR-L3 of | artificial | AA | QAWDSSTVV |
| | CDH19 14077 | | | |
| 1236 | VH of CDH19 | artificial | NT | CAGGTGCAGCTGGTGGAGTCTGGGGGAGGCGTGGTCCAGCCTG |
| | 14077 | | | GGAGGTCCCTGAGACTCTCCTGTGCAGCGTCTGGATTCACCTT |
| | | | | CAGTCGCTATGGCATACACTGGGTCCGCCAGGCTCCAGGCAAG |
| | | | | GGGCTGGAGTGGGTGGCAGTTATATGGTATGATGGAAGTAATA |
| | | | | AATACTATGCAGACTCCGTGAAGGGCCGATTCACCATCTCCAG |
| | | | | AGACAATTCCAAGAACACGCTGTATCTGCAAATGAACAGCCTG |
| | | | | AGAGCCGAGGACTCGGCTGTGTATTACTGTGCGAGAAGGGCCG |
| | | | | GTATACCTGGAACTACGGGCTACTACTATGGTATGGACGTCTG |
| | | | | GGGCCAAGGGACCACGGTCACCGTCTCCTCA |
| 1237 | VH of CDH19 | artificial | AA | QVQLVESGGGVVQPGRSLRLSCAASGFTFSRYGIHWVRQAPGK |
| | 14077 | | | GLEWVAVIWYDGSNKYYADSVKGRFTISRDNSKNTLYLQMNSL |
| | | | | RAEDSAVYYCARRAGIPGTTGYYYGMDVWGQGTTVTVSS |
| 1238 | VL of CDH19 | artificial | NT | TCCTATGAGCTGACTCAGCCACCCTCAGTGTCCGTGTCCCCAG |
| | 14077 | | | GACAGACAGCCAGCATCACCTGCTCTGGAGATAGATTGGGGGA |
| | | | | GAAATATGTTAGCTGGTATCAGCAGAAGCCAGGCCAGTCCCCT |
| | | | | ATACTGGTCATCTATCAAGATAATAAGTGGCCCTCAGGGATCC |
| | | | | CTGAGCGATTCTCTGGCTCCAACTCTGGGAACACAGCCACTCT |
| | | | | GACCATCAGCGGGACCCAGGCTATGGATGAGGCTGACTATTAC |
| | | | | TGTCAGGCGTGGGACAGCAGCACTGTGGTATTCGGCGGGGGGA |
| | | | | CCAAGCTGACCGTCCTA |
| 1239 | VL of CDH19 | artificial | AA | SYELTQPPSVSVSPGQTASITCSGDRLGEKYVSWYQQKPGQSP |
| | 14077 | | | ILVIYQDNKWPSGIPERFSGSNSGNTATLTISGTQAMDEADYY |
| | | | | CQAWDSSTVVFGGGTKLTVL |
| 1240 | VH-VL of | artificial | NT | CAGGTGCAGCTGGTGGAGTCTGGGGGAGGCGTGGTCCAGCCTG |
| | CDH19 14077 | | | GGAGGTCCCTGAGACTCTCCTGTGCAGCGTCTGGATTCACCTT |
| | | | | CAGTCGCTATGGCATACACTGGGTCCGCCAGGCTCCAGGCAAG |
| | | | | GGGCTGGAGTGGGTGGCAGTTATATGGTATGATGGAAGTAATA |
| | | | | AATACTATGCAGACTCCGTGAAGGGCCGATTCACCATCTCCAG |
| | | | | AGACAATTCCAAGAACACGCTGTATCTGCAAATGAACAGCCTG |
| | | | | AGAGCCGAGGACTCGGCTGTGTATTACTGTGCGAGAAGGGCCG |
| | | | | GTATACCTGGAACTACGGGCTACTACTATGGTATGGACGTCTG |
| | | | | GGGCCAAGGGACCACGGTCACCGTCTCCTCAGGTGGCGGAGGA |
| | | | | TCTGGCGGAGGTGGAAGCGGAGGCGGCGGATCTTCCTATGAGC |
| | | | | TGACTCAGCCACCCTCAGTGTCCGTGTCCCCAGGACAGACAGC |
| | | | | CAGCATCACCTGCTCTGGAGATAGATTGGGGGAGAAATATGTT |
| | | | | AGCTGGTATCAGCAGAAGCCAGGCCAGTCCCCTATACTGGTCA |
| | | | | TCTATCAAGATAATAAGTGGCCCTCAGGGATCCCTGAGCGATT |
| | | | | CTCTGGCTCCAACTCTGGGAACACAGCCACTCTGACCATCAGC |
| | | | | GGGACCCAGGCTATGGATGAGGCTGACTATTACTGTCAGGCGT |
| | | | | GGGACAGCAGCACTGTGGTATTCGGCGGGGGGACCAAGCTGAC |
| | | | | CGTCCTA |
| 1241 | VH-VL of | artificial | AA | QVQLVESGGGVVQPGRSLRLSCAASGFTFSRYGIHWVRQAPGK |
| | CDH19 14077 | | | GLEWVAVIWYDGSNKYYADSVKGRFTISRDNSKNTLYLQMNSL |
| | | | | RAEDSAVYYCARRAGIPGTTGYYYGMDVWGQGTTVTVSSGGGG |
| | | | | SGGGGSGGGGSSYELTQPPSVSVSPGQTASITCSGDRLGEKYV |
| | | | | SWYQQKPGQSPILVIYQDNKWPSGIPERFSGSNSGNTATLTIS |
| | | | | GTQAMDEADYYCQAWDSSTVVFGGGTKLTVL |
| 1242 | CDH19 14077 | artificial | | QVQLVESGGGVVQPGRSLRLSCAASGFTFSRYGIHWVRQAPGK |
| | x I2C | | | GLEWVAVIWYDGSNKYYADSVKGRFTISRDNSKNTLYLQMNSL |
| | | | | RAEDSAVYYCARRAGIPGTTGYYYGMDVWGQGTTVTVSSGGGG |
| | | | | SGGGGSGGGGSSYELTQPPSVSVSPGQTASITCSGDRLGEKYV |
| | | | | SWYQQKPGQSPILVIYQDNKWPSGIPERFSGSNSGNTATLTIS |
| | | | | GTQAMDEADYYCQAWDSSTVVFGGGTKLTVLSGGGGSEVQLVE |
| | | | | SGGGLVQPGGSLKLSCAASGFTFNKYAMNWVRQAPGKGLEWVA |
| | | | | RIRSKYNNYATYYADSVKDRFTISRDDSKNTAYLQMNNLKTED |
| | | | | TAVYYCVRHGNFGNSYISYWAYWGQGTLVTVSSGGGGSGGGGS |
| | | | | GGGGSQTVVTQEPSLTVSPGGTVTLTCGSSTGAVTSGNYPNWV |
| | | | | QQKPGQAPRGLIGGTKFLAPGTPARFSGSLLGGKAALTLSGVQ |
| | | | | PEDEAEYYCVLWYSNRWVFGGGTKLTVLHHHHHH |
| 1243 | CDR-H1 of | artificial | AA | SYYIH |
| | CDH19 14096 | | | |
| 1244 | CDR-H2 of | artificial | AA | IINPSGGSTRYAQKFQG |
| | CDH19 14096 | | | |
| 1245 | CDR-H3 of | artificial | AA | GGIQLWLHFDY |
| | CDH19 14096 | | | |
| 1246 | CDR-L1 of | artificial | AA | SGSSSNIGRNFVN |
| | CDH19 14096 | | | |
| 1247 | CDR-L2 of | artificial | AA | TNNQRPS |
| | CDH19 14096 | | | |
| 1248 | CDR-L3 of | artificial | AA | AAWDESLNGWV |
| | CDH19 14096 | | | |
| 1249 | VH of CDH19 | artificial | NT | CAGGTGCAGCTGGTGCAGTCTGGGGCTGAGGTGAAGAAGCCTG |
| | 14096 | | | GGGCCTCAGTGAAGGTTTCCTGCAAGGCATCTGGATACACCTT |
| | | | | CACCAGCTACTATATTCACTGGGTGCGCCAGGCCCCTGGACAA |
| | | | | GGACTTGAGTGGATGGGAATAATCAACCCCAGTGGTGGTAGCA |
| | | | | CAAGGTACGCACAGAAGTTCCAGGGCAGAGTCACCATGACCAG |
| | | | | GGACACGTCCACGAGCACAGTCTACATGGAGCTGAGCAGCCTG |
| | | | | AGATCTGAGGACACGGCCGTGTATTACTGTGCGCGAGGGGGAA |
| | | | | TACAGCTATGGTTACATTTTGACTACTGGGGCCAGGGAACCCT |
| | | | | GGTCACCGTCTCCTCA |
| 1250 | VH of CDH19 | artificial | AA | QVQLVQSGAEVKKPGASVKVSCKASGYTFTSYYIHWVRQAPGQ |
| | 14096 | | | GLEWMGIINPSGGSTRYAQKFQGRVTMTRDTSTSTVYMELSSL |
| | | | | RSEDTAVYYCARGGIQLWLHFDYWGQGTLVTVSS |
| 1251 | VL of CDH19 | artificial | NT | CAGTCTGCGCTGACTCAGCCACCCTCAGCGACTGGGACCCCCG |
| | 14096 | | | GGCAGAGGGTCACCATCTCTTGTTCTGGAAGCAGCTCCAACAT |
| | | | | CGGAAGGAATTTTGTAAACTGGTATCAGCAGCTCCCAGGAACG |
| | | | | GCCCCCAAAGTCCTCATTTATACTAATAATCAGCGGCCCTCAG |
| | | | | GGGTCCCTGACCGATTCTCTGGCTCCAAGTCTGGCACCTCAGC |
| | | | | CTCCCTGGCCATCAGTGGGCTCCAGTCTGAGGATGAGGCTGAT |
| | | | | TATTACTGTGCAGCATGGGATGAGAGCCTGAATGGTTGGGTGT |
| | | | | TCGGCGGAGGGACCAAGCTGACCGTCCTA |
| 1252 | VL of CDH19 | artificial | AA | QSALTQPPSATGTPGQRVTISCSGSSSNIGRNFVNWYQQLPGT |
| | | | | APKVLIYTNNQRPSGVPDRFSGSKSGTSASLAISGLQSEDEAD |
| | | | | YYCAAWDESLNGWVFGGGTKLTVL |
| 1253 | VH-VL of | artificial | NT | CAGGTGCAGCTGGTGCAGTCTGGGGCTGAGGTGAAGAAGCCTG |
| | CDH19 14096 | | | GGGCCTCAGTGAAGGTTTCCTGCAAGGCATCTGGATACACCTT |
| | | | | CACCAGCTACTATATTCACTGGGTGCGCCAGGCCCCTGGACAA |
| | | | | GGACTTGAGTGGATGGGAATAATCAACCCCAGTGGTGGTAGCA |
| | | | | CAAGGTACGCACAGAAGTTCCAGGGCAGAGTCACCATGACCAG |
| | | | | GGACACGTCCACGAGCACAGTCTACATGGAGCTGAGCAGCCTG |
| | | | | AGATCTGAGGACACGGCCGTGTATTACTGTGCGCGAGGGGGAA |
| | | | | TACAGCTATGGTTACATTTTGACTACTGGGGCCAGGGAACCCT |
| | | | | GGTCACCGTCTCCTCAGGTGGCGGAGGATCTGGCGGAGGTGGA |
| | | | | AGCGGAGGCGGCGGATCTCAGTCTGCGCTGACTCAGCCACCCT |
| | | | | CAGCGACTGGGACCCCCGGGCAGAGGGTCACCATCTCTTGTTC |
| | | | | TGGAAGCAGCTCCAACATCGGAAGGAATTTTGTAAACTGGTAT |
| | | | | CAGCAGCTCCCAGGAACGGCCCCCAAAGTCCTCATTTATACTA |
| | | | | ATAATCAGCGGCCCTCAGGGGTCCCTGACCGATTCTCTGGCTC |
| | | | | CAAGTCTGGCACCTCAGCCTCCCTGGCCATCAGTGGGCTCCAG |
| | | | | TCTGAGGATGAGGCTGATTATTACTGTGCAGCATGGGATGAGA |
| | | | | GCCTGAATGGTTGGGTGTTCGGCGGAGGGACCAAGCTGACCGT |
| | | | | CCTA |
| 1254 | VH-VL of | artificial | AA | QVQLVQSGAEVKKPGASVKVSCKASGYTFTSYYIHWVRQAPGQ |
| | CDH19 14096 | | | GLEWMGIINPSGGSTRYAQKFQGRVTMTRDTSTSTVYMELSSL |
| | | | | RSEDTAVYYCARGGIQLWLHFDYWGQGTLVTVSSGGGGSGGGG |
| | | | | SGGGGSQSALTQPPSATGTPGQRVTISCSGSSSNIGRNFVNWY |
| | | | | QQLPGTAPKVLIYTNNQRPSGVPDRFSGSKSGTSASLAISGLQ |
| | | | | SEDEADYYCAAWDESLNGWVFGGGTKLTVL |
| 1255 | CDH19 14096 | artificial | | QVQLVQSGAEVKKPGASVKVSCKASGYTFTSYYIHWVRQAPGQ |
| | x I2C | | | GLEWMGIINPSGGSTRYAQKFQGRVTMTRDTSTSTVYMELSSL |
| | | | | RSEDTAVYYCARGGIQLWLHFDYWGQGTLVTVSSGGGGSGGGG |
| | | | | SGGGGSQSALTQPPSATGTPGQRVTISCSGSSSNIGRNFVNWY |
| | | | | QQLPGTAPKVLIYTNNQRPSGVPDRFSGSKSGTSASLAISGLQ |
| | | | | SEDEADYYCAAWDESLNGWVFGGGTKLTVLSGGGGSEVQLVES |
| | | | | GGGLVQPGGSLKLSCAASGFTFNKYAMNWVRQAPGKGLEWVAR |
| | | | | IRSKYNNYATYYADSVKDRFTISRDDSKNTAYLQMNNLKTEDT |
| | | | | AVYYCVRHGNFGNSYISYWAYWGQGTLVTVSSGGGGSGGGGSG |
| | | | | GGGSQTVVTQEPSLTVSPGGTVTLTCGSSTGAVTSGNYPNWVQ |
| | | | | QKPGQAPRGLIGGTKFLAPGTPARFSGSLLGGKAALTLSGVQP |
| | | | | EDEAEYYCVLWYSNRWVFGGGTKLTVLHHHHHH |
| 1256 | CDR-H1 of | artificial | AA | SYYMS |
| | CDH19 14088 | | | |
| 1257 | CDR-H2 of | artificial | AA | IIHPSGGDTTYAQKFQG |
| | CDH19 14088 | | | |
| 1258 | CDR-H3 of | artificial | AA | GGIKLWLHFDY |
| | CDH19 14088 | | | |
| 1259 | CDR-L1 of | artificial | AA | SGSRSNIGSNFVN |
| | CDH19 14088 | | | |
| 1260 | CDR-L2 of | artificial | AA | TNNQRPS |
| | CDH19 14088 | | | |
| 1261 | CDR-L3 of | artificial | AA | AVWDDSLNGWV |
| | CDH19 14088 | | | |
| 1262 | VH of CDH19 | artificial | NT | CAGGTGCAGTTGGTGCAGTCTGGGGCTGAGGTGAAGAAGCCTG |
| | 14088 | | | GGGCCTCAGTGAAGGTTTCCTGTAAGGCATCTGGATACACCTT |
| | | | | CACCAGCTACTATATGTCCTGGGTGCGACAGGCCCCTGGACAA |
| | | | | GGGCTTGAGTGGATGGGAATAATCCACCCTAGTGGTGGTGACA |
| | | | | CAACCTACGCACAGAAGTTCCAGGGCAGAGTCACCATGACCAG |
| | | | | GGACACGTCCACGAGCACAGTCTACATGGAGCTGAGCAGCCTG |
| | | | | AGATCTGAGGACACGGCCGTGTATTACTGTGCGAGAGGGGGGA |
| | | | | TAAAACTATGGTTACATTTTGACTATTGGGGCCAGGGAACCCT |
| | | | | GGTCACCGTCTCCTCA |
| 1263 | VH of CDH19 | artificial | AA | QVQLVQSGAEVKKPGASVKVSCKASGYTFTSYYMSWVRQAPGQ |
| | 14088 | | | GLEWMGIIHPSGGDTTYAQKFQGRVTMTRDTSTSTVYMELSSL |
| | | | | RSEDTAVYYCARGGIKLWLHFDYWGQGTLVTVSS |
| 1264 | VL of CDH19 | artificial | NT | CAGTCTGTGCTGACTCAGCCACCCTCAGCGTCTGGGACCCCCG |
| | 14088 | | | GACAGAGGGTCACCATCTCTTGTTCTGGAAGCCGCTCCAACAT |
| | | | | CGGAAGTAATTTTGTAAACTGGTACCAGCAGCTCCCAGGAACG |
| | | | | GCCCCCAAACTCCTCATCTATACTAATAATCAGCGGCCCTCAG |
| | | | | GGGTCCCTGACCGATTCTCTGGCTCCAAGTCTGGCACCTCAGC |
| | | | | CTCCCTGGCCATCAGTGGGCTCCAGTCTGAGGATGAGGCTGAT |
| | | | | TATTACTGTGCAGTATGGGATGACAGCCTGAATGGTTGGGTGT |
| | | | | TCGGCGGAGGGACCAAGCTGACCGTCCTA |
| 1265 | VL of CDH19 | artificial | AA | QSVLTQPPSASGTPGQRVTISCSGSRSNIGSNFVNWYQQLPGT |
| | 14088 | | | APKLLIYTNNQRPSGVPDRFSGSKSGTSASLAISGLQSEDEAD |
| | | | | YYCAVWDDSLNGWVFGGGTKLTVL |
| 1266 | VH-VL of | artificial | NT | CAGGTGCAGTTGGTGCAGTCTGGGGCTGAGGTGAAGAAGCCTG |
| | CDH19 14088 | | | GGGCCTCAGTGAAGGTTTCCTGTAAGGCATCTGGATACACCTT |
| | | | | CACCAGCTACTATATGTCCTGGGTGCGACAGGCCCCTGGACAA |
| | | | | GGGCTTGAGTGGATGGGAATAATCCACCCTAGTGGTGGTGACA |
| | | | | CAACCTACGCACAGAAGTTCCAGGGCAGAGTCACCATGACCAG |
| | | | | GGACACGTCCACGAGCACAGTCTACATGGAGCTGAGCAGCCTG |
| | | | | AGATCTGAGGACACGGCCGTGTATTACTGTGCGAGAGGGGGGA |
| | | | | TAAAACTATGGTTACATTTTGACTATTGGGGCCAGGGAACCCT |
| | | | | GGTCACCGTCTCCTCAGGTGGCGGAGGATCTGGCGGAGGTGGA |
| | | | | AGCGGAGGCGGCGGATCTCAGTCTGTGCTGACTCAGCCACCCT |
| | | | | CAGCGTCTGGGACCCCCGGACAGAGGGTCACCATCTCTTGTTC |
| | | | | TGGAAGCCGCTCCAACATCGGAAGTAATTTTGTAAACTGGTAC |
| | | | | CAGCAGCTCCCAGGAACGGCCCCCAAACTCCTCATCTATACTA |
| | | | | ATAATCAGCGGCCCTCAGGGGTCCCTGACCGATTCTCTGGCTC |
| | | | | CAAGTCTGGCACCTCAGCCTCCCTGGCCATCAGTGGGCTCCAG |
| | | | | TCTGAGGATGAGGCTGATTATTACTGTGCAGTATGGGATGACA |
| | | | | GCCTGAATGGTTGGGTGTTCGGCGGAGGGACCAAGCTGACCGT |
| | | | | CCTA |
| 1267 | VH-VL of | artificial | AA | QVQLVQSGAEVKKPGASVKVSCKASGYTFTSYYMSWVRQAPGQ |
| | CDH19 14088 | | | GLEWMGIIHPSGGDTTYAQKFQGRVTMTRDTSTSTVYMELSSL |
| | | | | RSEDTAVYYCARGGIKLWLHFDYWGQGTLVTVSSGGGGSGGGG |
| | | | | SGGGGSQSVLTQPPSASGTPGQRVTISCSGSRSNIGSNFVNWY |
| | | | | QQLPGTAPKLLIYTNNQRPSGVPDRFSGSKSGTSASLAISGLQ |
| | | | | SEDEADYYCAVWDDSLNGWVFGGGTKLTVL |
| 1268 | CDH19 14088 | artificial | | QVQLVQSGAEVKKPGASVKVSCKASGYTFTSYYMSWVRQAPGQ |
| | x I2C | | | GLEWMGIIHPSGGDTTYAQKFQGRVTMTRDTSTSTVYMELSSL |
| | | | | RSEDTAVYYCARGGIKLWLHFDYWGQGTLVTVSSGGGGSGGGG |
| | | | | SGGGGSQSVLTQPPSASGTPGQRVTISCSGSRSNIGSNFVNWY |
| | | | | QQLPGTAPKLLIYTNNQRPSGVPDRFSGSKSGTSASLAISGLQ |
| | | | | SEDEADYYCAVWDDSLNGWVFGGGTKLTVLSGGGGSEVQLVES |
| | | | | GGGLVQPGGSLKLSCAASGFTFNKYAMNWVRQAPGKGLEWVAR |
| | | | | IRSKYNNYATYYADSVKDRFTISRDDSKNTAYLQMNNLKTEDT |
| | | | | AVYYCVRHGNFGNSYISYWAYWGQGTLVTVSSGGGGSGGGGSG |
| | | | | GGGSQTVVTQEPSLTVSPGGTVTLTCGSSTGAVTSGNYPNWVQ |
| | | | | QKPGQAPRGLIGGTKFLAPGTPARFSGSLLGGKAALTLSGVQP |
| | | | | EDEAEYYCVLWYSNRWVFGGGTKLTVLHHHHHH |
| 1269 | CDR-H1 of | artificial | AA | SYYMS |
| | CDH19 14085 | | | |
| 1270 | CDR-H2 of | artificial | AA | IIHPSGGDTTYAQKFQG |
| | CDH19 14085 | | | |
| 1271 | CDR-H3 of | artificial | AA | GGIKLWLHFDY |
| | CDH19 14085 | | | |
| 1272 | CDR-L1 of | artificial | AA | SGSRSNIGSNFVN |
| | CDH19 14085 | | | |
| 1273 | CDR-L2 of | artificial | AA | TNNQRPS |
| | CDH19 14085 | | | |
| 1274 | CDR-L3 of | artificial | AA | AVYDDSLNGWV |
| | CDH19 14085 | | | |
| 1275 | VH of CDH19 | artificial | NT | CAGGTGCAGTTGGTGCAGTCTGGGGCTGAGGTGAAGAAGCCTG |
| | 14085 | | | GGGCCTCAGTGAAGGTTTCCTGTAAGGCATCTAGATACACCTT |
| | | | | CACCAGCTACTATATGTCCTGGGTGCGACAGGCCCCTGGACAA |
| | | | | GGGCTTGAGTGGATGGGAATAATCCACCCTAGTGGTGGTGACA |
| | | | | CAACCTACGCACAGAAGTTCCAGGGCAGAGTCACCATGACCGG |
| | | | | GGACACGTCCACGAGCACAGTCTACATGGAGCTGAGCAGCCTG |
| | | | | AGATCTGAGGACACGGCCGTGTATTACTGTGCGAGAGGGGGGA |
| | | | | TAAAACTATGGTTACATTTTGACTATTGGGGCCAGGGAACCCT |
| | | | | GGTCACCGTCTCCTCA |
| 1276 | VH of CDH19 | artificial | AA | QVQLVQSGAEVKKPGASVKVSCKASRYTFTSYYMSWVRQAPGQ |
| | 14085 | | | GLEWMGIIHPSGGDTTYAQKFQGRVTMTGDTSTSTVYMELSSL |
| | | | | RSEDTAVYYCARGGIKLWLHFDYWGQGTLVTVSS |
| 1277 | VL of CDH19 | artificial | NT | CAGTCTGTGCTGACTCAGCCACCCTCAGCGTCTGGGACCCCCG |
| | 14085 | | | GACAGAGGGTCACCATCTCTTGTTCTGGAAGCCGCTCCAACAT |
| | | | | CGGAAGTAATTTTGTAAACTGGTACCAGCAGCTCCCAGGAACG |
| | | | | GCCCCCAAACTCCTCATCTATACTAATAATCAGCGGCCCTCAG |
| | | | | GGGTCCCTGACCGATTCTCTGGCTCCAAGTCTGGCACCTCAGC |
| | | | | CTCCCTGGCCATCAGTGGGCTCCAGTCTGAGGATGAGGCTGAT |
| | | | | TATTACTGTGCAGTATACGATGACAGCCTGAATGGTTGGGTGT |
| | | | | TCGGCGGAGGGACCAAGCTGACCGTCCTA |
| 1278 | VL of CDH19 | artificial | AA | QSVLTQPPSASGTPGQRVTISCSGSRSNIGSNFVNWYQQLPGT |
| | 14085 | | | APKLLIYTNNQRPSGVPDRFSGSKSGTSASLAISGLQSEDEAD |
| | | | | YYCAVYDDSLNGWVFGGGTKLTVL |
| 1279 | VH-VL of | artificial | NT | CAGGTGCAGTTGGTGCAGTCTGGGGCTGAGGTGAAGAAGCCTG |
| | CDH19 14085 | | | GGGCCTCAGTGAAGGTTTCCTGTAAGGCATCTAGATACACCTT |
| | | | | CACCAGCTACTATATGTCCTGGGTGCGACAGGCCCCTGGACAA |
| | | | | GGGCTTGAGTGGATGGGAATAATCCACCCTAGTGGTGGTGACA |
| | | | | CAACCTACGCACAGAAGTTCCAGGGCAGAGTCACCATGACCGG |
| | | | | GGACACGTCCACGAGCACAGTCTACATGGAGCTGAGCAGCCTG |
| | | | | AGATCTGAGGACACGGCCGTGTATTACTGTGCGAGAGGGGGGA |
| | | | | TAAAACTATGGTTACATTTTGACTATTGGGGCCAGGGAACCCT |
| | | | | GGTCACCGTCTCCTCAGGTGGCGGAGGATCTGGCGGAGGTGGA |
| | | | | AGCGGAGGCGGCGGATCTCAGTCTGTGCTGACTCAGCCACCCT |
| | | | | CAGCGTCTGGGACCCCCGGACAGAGGGTCACCATCTCTTGTTC |
| | | | | TGGAAGCCGCTCCAACATCGGAAGTAATTTTGTAAACTGGTAC |
| | | | | CAGCAGCTCCCAGGAACGGCCCCCAAACTCCTCATCTATACTA |
| | | | | ATAATCAGCGGCCCTCAGGGGTCCCTGACCGATTCTCTGGCTC |
| | | | | CAAGTCTGGCACCTCAGCCTCCCTGGCCATCAGTGGGCTCCAG |
| | | | | TCTGAGGATGAGGCTGATTATTACTGTGCAGTATACGATGACA |
| | | | | GCCTGAATGGTTGGGTGTTCGGCGGAGGGACCAAGCTGACCGT |
| | | | | CCTA |
| 1280 | VH-VL of | artificial | AA | QVQLVQSGAEVKKPGASVKVSCKASRYTFTSYYMSWVRQAPGQ |
| | CDH19 14085 | | | GLEWMGIIHPSGGDTTYAQKFQGRVTMTGDTSTSTVYMELSSL |
| | | | | RSEDTAVYYCARGGIKLWLHFDYWGQGTLVTVSSGGGGSGGGG |
| | | | | SGGGGSQSVLTQPPSASGTPGQRVTISCSGSRSNIGSNFVNWY |
| | | | | QQLPGTAPKLLIYTNNQRPSGVPDRFSGSKSGTSASLAISGLQ |
| | | | | SEDEADYYCAVYDDSLNGWVFGGGTKLTVL |
| 1281 | CDH19 14085 | artificial | | QVQLVQSGAEVKKPGASVKVSCKASRYTFTSYYMSWVRQAPGQ |
| | x I2C | | | GLEWMGIIHPSGGDTTYAQKFQGRVTMTGDTSTSTVYMELSSL |
| | | | | RSEDTAVYYCARGGIKLWLHFDYWGQGTLVTVSSGGGGSGGGG |
| | | | | SGGGGSQSVLTQPPSASGTPGQRVTISCSGSRSNIGSNFVNWY |
| | | | | QQLPGTAPKLLIYTNNQRPSGVPDRFSGSKSGTSASLAISGLQ |
| | | | | SEDEADYYCAVYDDSLNGWVFGGGTKLTVLSGGGGSEVQLVES |
| | | | | GGGLVQPGGSLKLSCAASGFTFNKYAMNWVRQAPGKGLEWVAR |
| | | | | IRSKYNNYATYYADSVKDRFTISRDDSKNTAYLQMNNLKTEDT |
| | | | | AVYYCVRHGNFGNSYISYWAYWGQGTLVTVSSGGGGSGGGGSG |
| | | | | GGGSQTVVTQEPSLTVSPGGTVTLTCGSSTGAVTSGNYPNWVQ |
| | | | | QKPGQAPRGLIGGTKFLAPGTPARFSGSLLGGKAALTLSGVQP |
| | | | | EDEAEYYCVLWYSNRWVFGGGTKLTVLHHHHHH |
| 1282 | CDR-H1 of | artificial | AA | SYFIH |
| | CDH19 14074 | | | |
| 1283 | CDR-H2 of | artificial | AA | IINPISVSTSYAQKFQG |
| | CDH19 14074 | | | |
| 1284 | CDR-H3 of | artificial | AA | GGIQLWLHLDY |
| | CDH19 14074 | | | |
| 1285 | CDR-L1 of | artificial | AA | SGSRSNIGSNFVN |
| | CDH19 14074 | | | |
| 1286 | CDR-L2 of | artificial | AA | TNNQRPS |
| | CDH19 14074 | | | |
| 1287 | CDR-L3 of | artificial | AA | ATWDDSMNGWV |
| | CDH19 14074 | | | |
| 1288 | VH of CDH19 | artificial | NT | CAGGTGCAGTTGGTGCAGTCTGGGGCTGAGGTGAAGAAGCCTG |
| | 14074 | | | GGGCCTCAGTGAAGGTTTCCTGCAAGGTTTCTGGATACACCTT |
| | | | | CACCAGCTACTTTATTCACTGGGTGCGCCAGGCCCCTGGACAA |
| | | | | GGGCTTGAATGGATGGGAATTATCAACCCTATTAGTGTTAGCA |
| | | | | CAAGCTACGCACAGAAGTTCCAGGGCAGAGTCACCATGACCAG |
| | | | | GGACACGTCCACGAGCACAGTCTTCATGGAGCTGAGCAGCCTG |
| | | | | AGATCTGAGGACACGGCCGTGTATTACTGTGCGCGAGGGGGGA |
| | | | | TACAGCTATGGTTACATTTGGACTACTGGGGCCAGGGAACCCT |
| | | | | GGTCACCGTCTCCTCA |
| 1289 | VH of CDH19 | artificial | AA | QVQLVQSGAEVKKPGASVKVSCKVSGYTFTSYFIHWVRQAPGQ |
| | 14074 | | | GLEWMGIINPISVSTSYAQKFQGRVTMTRDTSTSTVFMELSSL |
| | | | | RSEDTAVYYCARGGIQLWLHLDYWGQGTLVTVSS |
| 1290 | VL of CDH19 | artificial | NT | CAGTCTGCGCTGACTCAGCCACCCTCAGTGACTGGGACCCCCG |
| | 14074 | | | GGCAGAGGGTCACCATCTCTTGTTCTGGAAGCAGGTCCAACAT |
| | | | | CGGAAGCAATTTTGTAAACTGGTACCAGCAGCTCCCAGGAACG |
| | | | | GCCCCCAAAGTCCTCATCTATACTAATAATCAGCGGCCCTCAG |
| | | | | GGGTCCCTGACCGATTCTCTGGCTCCAAGTCTGGCACCTCAGC |
| | | | | CTCCCTGGCCATCAGTGGGCTCCAGTCTGAGGATGAGGCTGAT |
| | | | | TATTACTGCGCAACATGGGATGACAGTATGAATGGTTGGGTGT |
| | | | | TCGGCGGAGGGACCAAACTGACCGTCCTA |
| 1291 | VL of CDH19 | artificial | AA | QSALTQPPSVTGTPGQRVTISCSGSRSNIGSNFVNWYQQLPGT |
| | 14074 | | | APKVLIYTNNQRPSGVPDRFSGSKSGTSASLAISGLQSEDEAD |
| | | | | YYCATWDDSMNGWVFGGGTKLTVL |
| 1292 | VH-VL of | artificial | NT | CAGGTGCAGTTGGTGCAGTCTGGGGCTGAGGTGAAGAAGCCTG |
| | CDH19 14074 | | | GGGCCTCAGTGAAGGTTTCCTGCAAGGTTTCTGGATACACCTT |
| | | | | CACCAGCTACTTTATTCACTGGGTGCGCCAGGCCCCTGGACAA |
| | | | | GGGCTTGAATGGATGGGAATTATCAACCCTATTAGTGTTAGCA |
| | | | | CAAGCTACGCACAGAAGTTCCAGGGCAGAGTCACCATGACCAG |
| | | | | GGACACGTCCACGAGCACAGTCTTCATGGAGCTGAGCAGCCTG |
| | | | | AGATCTGAGGACACGGCCGTGTATTACTGTGCGCGAGGGGGGA |
| | | | | TACAGCTATGGTTACATTTGGACTACTGGGGCCAGGGAACCCT |
| | | | | GGTCACCGTCTCCTCAGGTGGCGGAGGATCTGGCGGAGGTGGA |
| | | | | AGCGGAGGCGGCGGATCTCAGTCTGCGCTGACTCAGCCACCCT |
| | | | | CAGTGACTGGGACCCCCGGGCAGAGGGTCACCATCTCTTGTTC |
| | | | | TGGAAGCAGGTCCAACATCGGAAGCAATTTTGTAAACTGGTAC |
| | | | | CAGCAGCTCCCAGGAACGGCCCCCAAAGTCCTCATCTATACTA |
| | | | | ATAATCAGCGGCCCTCAGGGGTCCCTGACCGATTCTCTGGCTC |
| | | | | CAAGTCTGGCACCTCAGCCTCCCTGGCCATCAGTGGGCTCCAG |
| | | | | TCTGAGGATGAGGCTGATTATTACTGCGCAACATGGGATGACA |
| | | | | GTATGAATGGTTGGGTGTTCGGCGGAGGGACCAAACTGACCGT |
| | | | | CCTA |
| 1293 | VH-VL of | artificial | AA | QVQLVQSGAEVKKPGASVKVSCKVSGYTFTSYFIHWVRQAPGQ |
| | CDH19 14074 | | | GLEWMGIINPISVSTSYAQKFQGRVTMTRDTSTSTVFMELSSL |
| | | | | RSEDTAVYYCARGGIQLWLHLDYWGQGTLVTVSSGGGGSGGGG |
| | | | | SGGGGSQSALTQPPSVTGTPGQRVTISCSGSRSNIGSNFVNWY |
| | | | | QQLPGTAPKVLIYTNNQRPSGVPDRFSGSKSGTSASLAISGLQ |
| | | | | SEDEADYYCATWDDSMNGWVFGGGTKLTVL |
| 1294 | CDH19 14074 | artificial | | QVQLVQSGAEVKKPGASVKVSCKVSGYTFTSYFIHWVRQAPGQ |
| | x I2C | | | GLEWMGIINPISVSTSYAQKFQGRVTMTRDTSTSTVFMELSSL |
| | | | | RSEDTAVYYCARGGIQLWLHLDYWGQGTLVTVSSGGGGSGGGG |
| | | | | SGGGGSQSALTQPPSVTGTPGQRVTISCSGSRSNIGSNFVNWY |
| | | | | QQLPGTAPKVLIYTNNQRPSGVPDRFSGSKSGTSASLAISGLQ |
| | | | | SEDEADYYCATWDDSMNGWVFGGGTKLTVLSGGGGSEVQLVES |
| | | | | GGGLVQPGGSLKLSCAASGFTFNKYAMNWVRQAPGKGLEWVAR |
| | | | | IRSKYNNYATYYADSVKDRFTISRDDSKNTAYLQMNNLKTEDT |
| | | | | AVYYCVRHGNFGNSYISYWAYWGQGTLVTVSSGGGGSGGGGSG |
| | | | | GGGSQTVVTQEPSLTVSPGGTVTLTCGSSTGAVTSGNYPNWVQ |
| | | | | QKPGQAPRGLIGGTKFLAPGTPARFSGSLLGGKAALTLSGVQP |
| | | | | EDEAEYYCVLWYSNRWVFGGGTKLTVLHHHHHH |
| 1295 | CDR-H1 of | artificial | AA | SYFIH |
| | CDH19 14075 | | | |
| 1296 | CDR-H2 of | artificial | AA | IINPISVSTSYAQKFQG |
| | CDH19 14075 | | | |
| 1297 | CDR-H3 of | artificial | AA | GGIQLWLHLDY |
| | CDH19 14075 | | | |
| 1298 | CDR-L1 of | artificial | AA | SGSRSNIGSNFVN |
| | CDH19 14075 | | | |
| 1299 | CDR-L2 of | artificial | AA | TNNQRPS |
| | CDH19 14075 | | | |
| 1300 | CDR-L3 of | artificial | AA | ATWDESMQGWV |
| | CDH19 14075 | | | |
| 1301 | VH of CDH19 | artificial | NT | CAGGTGCAGTTGGTGCAGTCTGGGGCTGAGGTGAAGAAGCCTG |
| | 14075 | | | GGGCCTCAGTGAAGGTTTCCTGCAAGGTTTCTGGATACACCTT |
| | | | | CACCAGCTACTTTATTCACTGGGTGCGCCAGGCCCCTGGACAA |
| | | | | GGGCTTGAATGGATGGGAATTATCAACCCTATTAGTGTTAGCA |
| | | | | CAAGCTACGCACAGAAGTTCCAGGGCAGAGTCACCATGACCAG |
| | | | | GGACACGTCCACGAGCACAGTCTTCATGGAGCTGAGCAGCCTG |
| | | | | AGATCTGAGGACACGGCCGTGTATTACTGTGCGCGAGGGGGGA |
| | | | | TACAGCTATGGTTACATTTGGACTACTGGGGCCAGGGAACCCT |
| | | | | GGTCACCGTCTCCTCA |
| 1302 | VH of CDH19 | artificial | AA | QVQLVQSGAEVKKPGASVKVSCKVSGYTFTSYFIHWVRQAPGQ |
| | 14075 | | | GLEWMGIINPISVSTSYAQKFQGRVTMTRDTSTSTVFMELSSL |
| | | | | RSEDTAVYYCARGGIQLWLHLDYWGQGTLVTVSS |
| 1303 | VL of CDH19 | artificial | NT | CAGTCTGCGCTGACTCAGCCACCCTCAGTGACTGGGACCCCCG |
| | 14075 | | | GGCAGAGGGTCACCATCTCTTGTTCTGGAAGCAGGTCCAACAT |
| | | | | CGGAAGCAATTTTGTAAACTGGTACCAGCAGCTCCCAGGAACG |
| | | | | GCCCCCAAAGTCCTCATCTATACTAATAATCAGCGGCCCTCAG |
| | | | | GGGTCCCTGACCGATTCTCTGGCTCCAAGTCTGGCACCTCAGC |
| | | | | CTCCCTGGCCATCAGTGGGCTCCAGTCTGAGGATGAGGCTGAT |
| | | | | TATTACTGCGCAACATGGGATGAGAGTATGCAGGGTTGGGTGT |
| | | | | TCGGCGGAGGGACCAAACTGACCGTCCTA |
| 1304 | VL of CDH19 | artificial | AA | QSALTQPPSVTGTPGQRVTISCSGSRSNIGSNFVNWYQQLPGT |
| | 14075 | | | APKVLIYTNNQRPSGVPDRFSGSKSGTSASLAISGLQSEDEAD |
| | | | | YYCATWDESMQGWVFGGGTKLTVL |
| 1305 | VH-VL of | artificial | NT | CAGGTGCAGTTGGTGCAGTCTGGGGCTGAGGTGAAGAAGCCTG |
| | CDH19 14075 | | | GGGCCTCAGTGAAGGTTTCCTGCAAGGTTTCTGGATACACCTT |
| | | | | CACCAGCTACTTTATTCACTGGGTGCGCCAGGCCCCTGGACAA |
| | | | | GGGCTTGAATGGATGGGAATTATCAACCCTATTAGTGTTAGCA |
| | | | | CAAGCTACGCACAGAAGTTCCAGGGCAGAGTCACCATGACCAG |
| | | | | GGACACGTCCACGAGCACAGTCTTCATGGAGCTGAGCAGCCTG |
| | | | | AGATCTGAGGACACGGCCGTGTATTACTGTGCGCGAGGGGGGA |
| | | | | TACAGCTATGGTTACATTTGGACTACTGGGGCCAGGGAACCCT |
| | | | | GGTCACCGTCTCCTCAGGTGGCGGAGGATCTGGCGGAGGTGGA |
| | | | | AGCGGAGGCGGCGGATCTCAGTCTGCGCTGACTCAGCCACCCT |
| | | | | CAGTGACTGGGACCCCCGGGCAGAGGGTCACCATCTCTTGTTC |
| | | | | TGGAAGCAGGTCCAACATCGGAAGCAATTTTGTAAACTGGTAC |
| | | | | CAGCAGCTCCCAGGAACGGCCCCCAAAGTCCTCATCTATACTA |
| | | | | ATAATCAGCGGCCCTCAGGGGTCCCTGACCGATTCTCTGGCTC |
| | | | | CAAGTCTGGCACCTCAGCCTCCCTGGCCATCAGTGGGCTCCAG |
| | | | | TCTGAGGATGAGGCTGATTATTACTGCGCAACATGGGATGAGA |
| | | | | GTATGCAGGGTTGGGTGTTCGGCGGAGGGACCAAACTGACCGT |
| | | | | CCTA |
| 1306 | VH-VL of | artificial | AA | QVQLVQSGAEVKKPGASVKVSCKVSGYTFTSYFIHWVRQAPGQ |
| | CDH19 14075 | | | GLEWMGIINPISVSTSYAQKFQGRVTMTRDTSTSTVFMELSSL |
| | | | | RSEDTAVYYCARGGIQLWLHLDYWGQGTLVTVSSGGGGSGGGG |
| | | | | SGGGGSQSALTQPPSVTGTPGQRVTISCSGSRSNIGSNFVNWY |
| | | | | QQLPGTAPKVLIYTNNQRPSGVPDRFSGSKSGTSASLAISGLQ |
| | | | | SEDEADYYCATWDESMQGWVFGGGTKLTVL |
| 1307 | CDH19 14075 | artificial | | QVQLVQSGAEVKKPGASVKVSCKVSGYTFTSYFIHWVRQAPGQ |
| | x I2C | | | GLEWMGIINPISVSTSYAQKFQGRVTMTRDTSTSTVFMELSSL |
| | | | | RSEDTAVYYCARGGIQLWLHLDYWGQGTLVTVSSGGGGSGGGG |
| | | | | SGGGGSQSALTQPPSVTGTPGQRVTISCSGSRSNIGSNFVNWY |
| | | | | QQLPGTAPKVLIYTNNQRPSGVPDRFSGSKSGTSASLAISGLQ |
| | | | | SEDEADYYCATWDESMQGWVFGGGTKLTVLSGGGGSEVQLVES |
| | | | | GGGLVQPGGSLKLSCAASGFTFNKYAMNWVRQAPGKGLEWVAR |
| | | | | IRSKYNNYATYYADSVKDRFTISRDDSKNTAYLQMNNLKTEDT |
| | | | | AVYYCVRHGNFGNSYISYWAYWGQGTLVTVSSGGGGSGGGGSG |
| | | | | GGGSQTVVTQEPSLTVSPGGTVTLTCGSSTGAVTSGNYPNWVQ |
| | | | | QKPGQAPRGLIGGTKFLAPGTPARFSGSLLGGKAALTLSGVQP |
| | | | | EDEAEYYCVLWYSNRWVFGGGTKLTVLHHHHHH |
| 1308 | CDR-H1 of | artificial | AA | SSGYY |
| | CDH19 14024 | | | |
| 1309 | CDR-H2 of | artificial | AA | YIYYTGSAYYNPSLKS |
| | CDH19 14024 | | | |
| 1310 | CDR-H3 of | artificial | AA | DGSSGWYFQY |
| | CDH19 14024 | | | |
| 1311 | CDR-L1 of | artificial | AA | RASRQISSSYLA |
| | CDH19 14024 | | | |
| 1312 | CDR-L2 of | artificial | AA | GPSSRAT |
| | CDH19 14024 | | | |
| 1313 | CDR-L3 of | artificial | AA | QQYGSSFT |
| | CDH19 14024 | | | |
| 1314 | VH of CDH19 | artificial | NT | CAGGTGCAGCTGCAGGAGTCGGGCCCAGGACTGGTGAAGCCTT |
| | 14024 | | | CAGAGACCCTGTCCCTCACCTGCACTGTCTCTGGTGGCTCCAT |
| | | | | CAGCAGTAGTGGTTACTACTGGAGCTGGATCCGCCAGCCCCCA |
| | | | | GGGAAGGGCCTGGAGTGGATTGGGTACATCTATTACACTGGGA |
| | | | | GCGCCTACTACAACCCGTCCCTCAAGAGTCGAGTTACCATATC |
| | | | | AGTAGACACGTCTAAGAACCAGTTCTCCCTGAAGCTGAGCTCT |
| | | | | GTGACTGCCGCGGACACGGCCGTGTATTACTGTGCGAGAGATG |
| | | | | GAAGCAGTGGCTGGTACTTCCAGTATTGGGGCCAGGGCACCCT |
| | | | | GGTCACCGTCTCTAGT |
| 1315 | VH of CDH19 | artificial | AA | QVQLQESGPGLVKPSETLSLTCTVSGGSISSSGYYWSWIRQPP |
| | 14024 | | | GKGLEWIGYIYYTGSAYYNPSLKSRVTISVDTSKNQFSLKLSS |
| | | | | VTAADTAVYYCARDGSSGWYFQYWGQGTLVTVSS |
| 1316 | VL of CDH19 | artificial | NT | GAAATTGTGTTGACGCAGTCTCCAGGCACCCTGTCTTTGTCTC |
| | 14024 | | | CAGGGGAAAGAGCCACCCTCTCCTGCAGGGCCAGTCGGCAGAT |
| | | | | TAGCAGCAGCTACTTAGCCTGGTACCAGCAGAAACCTGGCCAG |
| | | | | GCTCCCAGGCTCCTCATCTATGGTCCATCCAGCAGGGCCACTG |
| | | | | GCATCCCAGACAGGTTCAGTGGCAGTGGGTCTGGGACAGACTT |
| | | | | CACTCTCACCATCAGCAGACTGGAGCCTGAAGATTTTGCAGTG |
| | | | | TATTACTGTCAGCAGTATGGTAGCTCATTCACTTTCGGCCAGG |
| | | | | GGACCAAAGTGGATATCAAA |
| 1317 | VL of CDH19 | artificial | AA | EIVLTQSPGTLSLSPGERATLSCRASRQISSSYLAWYQQKPGQ |
| | 14024 | | | APRLLIYGPSSRATGIPDRFSGSGSGTDFTLTISRLEPEDFAV |
| | | | | YYCQQYGSSFTFGQGTKVDIK |
| 1318 | VH-VL of | artificial | NT | CAGGTGCAGCTGCAGGAGTCGGGCCCAGGACTGGTGAAGCCTT |
| | CDH19 | | | CAGAGACCCTGTCCCTCACCTGCACTGTCTCTGGTGGCTCCAT |
| | | | | CAGCAGTAGTGGTTACTACTGGAGCTGGATCCGCCAGCCCCCA |
| | | | | GGGAAGGGCCTGGAGTGGATTGGGTACATCTATTACACTGGGA |
| | | | | GCGCCTACTACAACCCGTCCCTCAAGAGTCGAGTTACCATATC |
| | | | | AGTAGACACGTCTAAGAACCAGTTCTCCCTGAAGCTGAGCTCT |
| | | | | GTGACTGCCGCGGACACGGCCGTGTATTACTGTGCGAGAGATG |
| | | | | GAAGCAGTGGCTGGTACTTCCAGTATTGGGGCCAGGGCACCCT |
| | | | | GGTCACCGTCTCTAGTGGTGGCGGAGGATCTGGCGGAGGTGGA |
| | | | | AGCGGAGGCGGCGGATCTGAAATTGTGTTGACGCAGTCTCCAG |
| | | | | GCACCCTGTCTTTGTCTCCAGGGGAAAGAGCCACCCTCTCCTG |
| | | | | CAGGGCCAGTCGGCAGATTAGCAGCAGCTACTTAGCCTGGTAC |
| | | | | CAGCAGAAACCTGGCCAGGCTCCCAGGCTCCTCATCTATGGTC |
| | | | | CATCCAGCAGGGCCACTGGCATCCCAGACAGGTTCAGTGGCAG |
| | | | | TGGGTCTGGGACAGACTTCACTCTCACCATCAGCAGACTGGAG |
| | | | | CCTGAAGATTTTGCAGTGTATTACTGTCAGCAGTATGGTAGCT |
| | | | | CATTCACTTTCGGCCAGGGGACCAAAGTGGATATCAAA |
| 1319 | VH-VL of | artificial | AA | QVQLQESGPGLVKPSETLSLTCTVSGGSISSSGYYWSWIRQPP |
| | CDH19 14024 | | | GKGLEWIGYIYYTGSAYYNPSLKSRVTISVDTSKNQFSLKLSS |
| | | | | VTAADTAVYYCARDGSSGWYFQYWGQGTLVTVSSGGGGSGGGG |
| | | | | SGGGGSEIVLTQSPGTLSLSPGERATLSCRASRQISSSYLAWY |
| | | | | QQKPGQAPRLLIYGPSSRATGIPDRFSGSGSGTDFTLTISRLE |
| | | | | PEDFAVYYCQQYGSSFTFGQGTKVDIK |
| 1320 | CDH19 14024 | artificial | | QVQLQESGPGLVKPSETLSLTCTVSGGSISSSGYYWSWIRQPP |
| | x I2C | | | GKGLEWIGYIYYTGSAYYNPSLKSRVTISVDTSKNQFSLKLSS |
| | | | | VTAADTAVYYCARDGSSGWYFQYWGQGTLVTVSSGGGGSGGGG |
| | | | | SGGGGSEIVLTQSPGTLSLSPGERATLSCRASRQISSSYLAWY |
| | | | | QQKPGQAPRLLIYGPSSRATGIPDRFSGSGSGTDFTLTISRLE |
| | | | | PEDFAVYYCQQYGSSFTFGQGTKVDIKSGGGGSEVQLVESGGG |
| | | | | LVQPGGSLKLSCAASGFTFNKYAMNWVRQAPGKGLEWVARIRS |
| | | | | KYNNYATYYADSVKDRFTISRDDSKNTAYLQMNNLKTEDTAVY |
| | | | | YCVRHGNFGNSYISYWAYWGQGTLVTVSSGGGGSGGGGSGGGG |
| | | | | SQTVVTQEPSLTVSPGGTVTLTCGSSTGAVTSGNYPNWVQQKP |
| | | | | GQAPRGLIGGTKFLAPGTPARFSGSLLGGKAALTLSGVQPEDE |
| | | | | AEYYCVLWYSNRWVFGGGTKLTVLHHHHHH |
| 1321 | CDR-H1 of | artificial | AA | SYDMH |
| | CDH19 14054 | | | |
| 1322 | CDR-H2 of | artificial | AA | VISYDGTNEYYADSVKG |
| | CDH19 14054 | | | |
| 1323 | CDR-H3 of | artificial | AA | ERYFDWSFDY |
| | CDH19 14054 | | | |
| 1324 | CDR-L1 of | artificial | AA | RASQSVSNTYLA |
| | CDH19 14054 | | | |
| 1325 | CDR-L2 of | artificial | AA | GASSRAT |
| | CDH19 14054 | | | |
| 1326 | CDR-L3 of | artificial | AA | QQYSNSWT |
| | CDH19 14054 | | | |
| 1327 | VH of CDH19 | artificial | NT | CAGGTGCAGCTGGTGGAGTCTGGGGGAGGCGTGGTCCAGCCTG |
| | 14054 | | | GGGGGTCCCTGAGACTCTCCTGTGCAGCCTCTGGATTCACCTT |
| | | | | CAGTAGCTATGACATGCACTGGGTCCGCCAGGCTCCAGGCAAG |
| | | | | GGGCTGGAGTGGGTGGCAGTTATATCATATGATGGAACTAATG |
| | | | | AATACTATGCAGACTCCGTGAAGGGCCGATTCACCATCTCCAG |
| | | | | AGACACTTCCAAGAACACGCTGTATTTGCAAATGAACAGCCTG |
| | | | | AGAGCTGAGGACACGGCTGTATATTACTGTGCGAGAGAACGAT |
| | | | | ATTTTGACTGGTCTTTTGACTACTGGGGCCAGGGAACCCTGGT |
| | | | | CAGCGTCTCTAGT |
| 1328 | VH of CDH19 | artificial | AA | QVQLVESGGGVVQPGGSLRLSCAASGFTFSSYDMHWVRQAPGK |
| | 14054 | | | GLEWVAVISYDGTNEYYADSVKGRFTISRDTSKNTLYLQMNSL |
| | | | | RAEDTAVYYCARERYFDWSFDYWGQGTLVSVSS |
| 1329 | VL of CDH19 | artificial | NT | GAAATTGTATTGACGCAGTCTCCAGGCACCCTGTCTTTGTCTC |
| | 14054 | | | CAGGGGAAAGAGCCACCCTCTCCTGCAGGGCCAGTCAGAGTGT |
| | | | | TAGCAACACCTACTTAGCCTGGTACCAGCAGAGACCTGGCCAG |
| | | | | GCTCCCAGGCTCCTCATCTATGGTGCATCCAGCAGGGCCACTG |
| | | | | GCATCCCAGACAGATTCAGTGGCAGTGGGTCTGGGACAGACTT |
| | | | | CACTCTCACCATCAGCAGTCTGGAGCCTGAAGATTTTGCAGTG |
| | | | | TATTACTGTCAGCAGTACAGTAACTCGTGGACGTTCGGCCAAG |
| | | | | GGACCAAGGTGGAAATCAAA |
| 1330 | VL of CDH19 | artificial | AA | EIVLTQSPGTLSLSPGERATLSCRASQSVSNTYLAWYQQRPGQ |
| | 14054 | | | APRLLIYGASSRATGIPDRFSGSGSGTDFTLTISSLEPEDFAV |
| | | | | YYCQQYSNSWTFGQGTKVEIK |
| 1331 | VH-VL of | artificial | NT | CAGGTGCAGCTGGTGGAGTCTGGGGGAGGCGTGGTCCAGCCTG |
| | CDH19 14054 | | | GGGGGTCCCTGAGACTCTCCTGTGCAGCCTCTGGATTCACCTT |
| | | | | CAGTAGCTATGACATGCACTGGGTCCGCCAGGCTCCAGGCAAG |
| | | | | GGGCTGGAGTGGGTGGCAGTTATATCATATGATGGAACTAATG |
| | | | | AATACTATGCAGACTCCGTGAAGGGCCGATTCACCATCTCCAG |
| | | | | AGACACTTCCAAGAACACGCTGTATTTGCAAATGAACAGCCTG |
| | | | | AGAGCTGAGGACACGGCTGTATATTACTGTGCGAGAGAACGAT |
| | | | | ATTTTGACTGGTCTTTTGACTACTGGGGCCAGGGAACCCTGGT |
| | | | | CAGCGTCTCTAGTGGTGGCGGAGGATCTGGCGGAGGTGGAAGC |
| | | | | GGAGGCGGCGGATCTGAAATTGTATTGACGCAGTCTCCAGGCA |
| | | | | CCCTGTCTTTGTCTCCAGGGGAAAGAGCCACCCTCTCCTGCAG |
| | | | | GGCCAGTCAGAGTGTTAGCAACACCTACTTAGCCTGGTACCAG |
| | | | | CAGAGACCTGGCCAGGCTCCCAGGCTCCTCATCTATGGTGCAT |
| | | | | CCAGCAGGGCCACTGGCATCCCAGACAGATTCAGTGGCAGTGG |
| | | | | GTCTGGGACAGACTTCACTCTCACCATCAGCAGTCTGGAGCCT |
| | | | | GAAGATTTTGCAGTGTATTACTGTCAGCAGTACAGTAACTCGT |
| | | | | GGACGTTCGGCCAAGGGACCAAGGTGGAAATCAAA |
| 1332 | VH-VL of | artificial | AA | QVQLVESGGGVVQPGGSLRLSCAASGFTFSSYDMHWVRQAPGK |
| | CDH19 14054 | | | GLEWVAVISYDGTNEYYADSVKGRFTISRDTSKNTLYLQMNSL |
| | | | | RAEDTAVYYCARERYFDWSFDYWGQGTLVSVSSGGGGSGGGGS |
| | | | | GGGGSEIVLTQSPGTLSLSPGERATLSCRASQSVSNTYLAWYQ |
| | | | | QRPGQAPRLLIYGASSRATGIPDRFSGSGSGTDFTLTISSLEP |
| | | | | EDFAVYYCQQYSNSWTFGQGTKVEIK |
| 1333 | CDH19 14054 | artificial | | QVQLVESGGGVVQPGGSLRLSCAASGFTFSSYDMHWVRQAPGK |
| | x I2C | | | GLEWVAVISYDGTNEYYADSVKGRFTISRDTSKNTLYLQMNSL |
| | | | | RAEDTAVYYCARERYFDWSFDYWGQGTLVSVSSGGGGSGGGGS |
| | | | | GGGGSEIVLTQSPGTLSLSPGERATLSCRASQSVSNTYLAWYQ |
| | | | | QRPGQAPRLLIYGASSRATGIPDRFSGSGSGTDFTLTISSLEP |
| | | | | EDFAVYYCQQYSNSWTFGQGTKVEIKSGGGGSEVQLVESGGGL |
| | | | | VQPGGSLKLSCAASGFTFNKYAMNWVRQAPGKGLEWVARIRSK |
| | | | | YNNYATYYADSVKDRFTISRDDSKNTAYLQMNNLKTEDTAVYY |
| | | | | CVRHGNFGNSYISYWAYWGQGTLVTVSSGGGGSGGGGSGGGGS |
| | | | | QTVVTQEPSLTVSPGGTVTLTCGSSTGAVTSGNYPNWVQQKPG |
| | | | | QAPRGLIGGTKFLAPGTPARFSGSLLGGKAALTLSGVQPEDEA |
| | | | | EYYCVLWYSNRWVFGGGTKLTVLHHHHHH |
| 1334 | CDR-H1 of | artificial | AA | GYYWS |
| | CDH19 14056 | | | |
| 1335 | CDR-H2 of | artificial | AA | YFSYSGSTNYNPSLKS |
| | CDH19 14056 | | | |
| 1336 | CDR-H3 of | artificial | AA | NWAFHFDF |
| | CDH19 14056 | | | |
| 1337 | CDR-L1 of | artificial | AA | TGSSSNIGTGYAVH |
| | CDH19 14056 | | | |
| 1338 | CDR-L2 of | artificial | AA | GNNNRPS |
| | CDH19 14056 | | | |
| 1339 | CDR-L3 of | artificial | AA | QSYDSRLSGWV |
| | CDH19 14056 | | | |
| 1340 | VH of | artificial | NT | CAGGTGCAGCTGCAGGAGTCGGGCCCAGGACTGGTGAAGCCTT |
| | CDH19 14056 | | | CGGAGACCCTGTCCCTCACCTGCACTGTCTCTGGTGGCTCCAT |
| | | | | CAGTGGTTACTACTGGAGCTGGATCCGGCAGCCCCCAGGAAAG |
| | | | | GGACTGGAGTGGTTTGCATATTTCTCTTACAGTGGGAGCACCA |
| | | | | ACTACAACCCCTCCCTCAAGAGTCGAGTCACCTTATCAGTAGA |
| | | | | CACGTCCAAGAACCAGTTCTCCCTGAAGCTGAGCTCTGTGACC |
| | | | | GCTGCGGACACGGCCGTGTATTACTGTGCGAGGAACTGGGCCT |
| | | | | TCCACTTTGACTTCTGGGGCCAGGGAACCCTGGTCACCGTCTC |
| | | | | TAGT |
| 1341 | VH of CDH19 | artificial | AA | QVQLQESGPGLVKPSETLSLTCTVSGGSISGYYWSWIRQPPGK |
| | 14056 | | | GLEWFAYFSYSGSTNYNPSLKSRVTLSVDTSKNQFSLKLSSVT |
| | | | | AADTAVYYCARNWAFHFDFWGQGTLVTVSS |
| 1342 | VL of CDH19 | artificial | NT | CAGTCTGTGCTGACGCAGCCGCCCTCAGTGTCTGGGGCCCCAG |
| | 14056 | | | GACAGAGGGTCACCATCTCCTGCACTGGGAGCAGCTCCAACAT |
| | | | | CGGGACAGGTTATGCTGTACACTGGTACCAGCAGCTTCCAGGA |
| | | | | ACAGCCCCCAAACTCCTCATCTATGGTAACAACAATCGGCCCT |
| | | | | CAGGGGTTCCTGACCGATTCTCTGGCTCCAAGTCTGGCACCTC |
| | | | | AGCCTCCCTGGCCATCACTGGGCTCCAGGCTGAGGATGAGGCT |
| | | | | GATTATTACTGCCAGTCCTATGACAGCAGACTGAGTGGTTGGG |
| | | | | TGTTCGGCGGAGGGACCAAGCTGACCGTCCTA |
| 1343 | VL of CDH19 | artificial | AA | QSVLTQPPSVSGAPGQRVTISCTGSSSNIGTGYAVHWYQQLPG |
| | 14056 | | | TAPKLLIYGNNNRPSGVPDRFSGSKSGTSASLAITGLQAEDEA |
| | | | | DYYCQSYDSRLSGWVFGGGTKLTVL |
| 1344 | VH-VL of | artificial | NT | CAGGTGCAGCTGCAGGAGTCGGGCCCAGGACTGGTGAAGCCTT |
| | CDH19 14056 | | | CGGAGACCCTGTCCCTCACCTGCACTGTCTCTGGTGGCTCCAT |
| | | | | CAGTGGTTACTACTGGAGCTGGATCCGGCAGCCCCCAGGAAAG |
| | | | | GGACTGGAGTGGTTTGCATATTTCTCTTACAGTGGGAGCACCA |
| | | | | ACTACAACCCCTCCCTCAAGAGTCGAGTCACCTTATCAGTAGA |
| | | | | CACGTCCAAGAACCAGTTCTCCCTGAAGCTGAGCTCTGTGACC |
| | | | | GCTGCGGACACGGCCGTGTATTACTGTGCGAGGAACTGGGCCT |
| | | | | TCCACTTTGACTTCTGGGGCCAGGGAACCCTGGTCACCGTCTC |
| | | | | TAGTGGTGGCGGAGGATCTGGCGGAGGTGGAAGCGGAGGCGGC |
| | | | | GGATCTCAGTCTGTGCTGACGCAGCCGCCCTCAGTGTCTGGGG |
| | | | | CCCCAGGACAGAGGGTCACCATCTCCTGCACTGGGAGCAGCTC |
| | | | | CAACATCGGGACAGGTTATGCTGTACACTGGTACCAGCAGCTT |
| | | | | CCAGGAACAGCCCCCAAACTCCTCATCTATGGTAACAACAATC |
| | | | | GGCCCTCAGGGGTTCCTGACCGATTCTCTGGCTCCAAGTCTGG |
| | | | | CACCTCAGCCTCCCTGGCCATCACTGGGCTCCAGGCTGAGGAT |
| | | | | GAGGCTGATTATTACTGCCAGTCCTATGACAGCAGACTGAGTG |
| | | | | GTTGGGTGTTCGGCGGAGGGACCAAGCTGACCGTCCTA |
| 1345 | VH-VL of | artificial | AA | QVQLQESGPGLVKPSETLSLTCTVSGGSISGYYWSWIRQPPGK |
| | CDH19 14056 | | | GLEWFAYFSYSGSTNYNPSLKSRVTLSVDTSKNQFSLKLSSVT |
| | | | | AADTAVYYCARNWAFHFDFWGQGTLVTVSSGGGGSGGGGSGGG |
| | | | | GSQSVLTQPPSVSGAPGQRVTISCTGSSSNIGTGYAVHWYQQL |
| | | | | PGTAPKLLIYGNNNRPSGVPDRFSGSKSGTSASLAITGLQAED |
| | | | | EADYYCQSYDSRLSGWVFGGGTKLTVL |
| 1346 | CDH19 14056 | artificial | | QVQLQESGPGLVKPSETLSLTCTVSGGSISGYYWSWIRQPPGK |
| | x I2C | | | GLEWFAYFSYSGSTNYNPSLKSRVTLSVDTSKNQFSLKLSSVT |
| | | | | AADTAVYYCARNWAFHFDFWGQGTLVTVSSGGGGSGGGGSGGG |
| | | | | GSQSVLTQPPSVSGAPGQRVTISCTGSSSNIGTGYAVHWYQQL |
| | | | | PGTAPKLLIYGNNNRPSGVPDRFSGSKSGTSASLAITGLQAED |
| | | | | EADYYCQSYDSRLSGWVFGGGTKLTVLSGGGGSEVQLVESGGG |
| | | | | LVQPGGSLKLSCAASGFTFNKYAMNWVRQAPGKGLEWVARIRS |
| | | | | KYNNYATYYADSVKDRFTISRDDSKNTAYLQMNNLKTEDTAVY |
| | | | | YCVRHGNFGNSYISYWAYWGQGTLVTVSSGGGGSGGGGSGGGG |
| | | | | SQTVVTQEPSLTVSPGGTVTLTCGSSTGAVTSGNYPNWVQQKP |
| | | | | GQAPRGLIGGTKFLAPGTPARFSGSLLGGKAALTLSGVQPEDE |
| | | | | AEYYCVLWYSNRWVFGGGTKLTVLHHHHHH |
| 1347 | CDR-H1 of | artificial | AA | GYYWS |
| | CDH19 14057 | | | |
| 1348 | CDR-H2 of | artificial | AA | YFSYSGSTNYNPSLKS |
| | CDH19 14057 | | | |
| 1349 | CDR-H3 of | artificial | AA | NWAFHFDF |
| | CDH19 14057 | | | |
| 1350 | CDR-L1 of | artificial | AA | TGSSSNIGTGYAVH |
| | CDH19 14057 | | | |
| 1351 | CDR-L2 of | artificial | AA | GNNNRPS |
| | CDH19 14057 | | | |
| 1352 | CDR-L3 of | artificial | AA | QSYDSRLSGWV |
| | CDH19 14057 | | | |
| 1353 | VH of CDH19 | artificial | NT | CAGGTGCAGCTGCAGGAGTCGGGCCCAGGACTGGTGAAGCCTT |
| | 14057 | | | CGGAGACCCTGTCCCTCACCTGCACTGTCTCTGGTGGCTCCAT |
| | | | | CAGTGGTTACTACTGGAGCTGGATCCGGCAGCCCCCAGGAAAG |
| | | | | GGACTGGAGTGGATTGGATATTTCTCTTACAGTGGGAGCACCA |
| | | | | ACTACAACCCCTCCCTCAAGAGTCGAGTCACCTTATCAGTAGA |
| | | | | CACGTCCAAGAACCAGTTCTCCCTGAAGCTGAGCTCTGTGACC |
| | | | | GCTGCGGACACGGCCGTGTATTACTGTGCGAGGAACTGGGCCT |
| | | | | TCCACTTTGACTTCTGGGGCCAGGGAACCCTGGTCACCGTCTC |
| | | | | TAGT |
| 1354 | VH of CDH19 | artificial | AA | QVQLQESGPGLVKPSETLSLTCTVSGGSISGYYWSWIRQPPGK |
| | 14057 | | | GLEWIGYFSYSGSTNYNPSLKSRVTLSVDTSKNQFSLKLSSVT |
| | | | | AADTAVYYCARNWAFHFDFWGQGTLVTVSS |
| 1355 | VL of CDH19 | artificial | NT | CAGTCTGTGCTGACGCAGCCGCCCTCAGTGTCTGGGGCCCCAG |
| | 14057 | | | GACAGAGGGTCACCATCTCCTGCACTGGGAGCAGCTCCAACAT |
| | | | | CGGGACAGGTTATGCTGTACACTGGTACCAGCAGCTTCCAGGA |
| | | | | ACAGCCCCCAAACTCCTCATCTATGGTAACAACAATCGGCCCT |
| | | | | CAGGGGTTCCTGACCGATTCTCTGGCTCCAAGTCTGGCACCTC |
| | | | | AGCCTCCCTGGCCATCACTGGGCTCCAGGCTGAGGATGAGGCT |
| | | | | GATTATTACTGCCAGTCCTATGACAGCAGACTGAGTGGTTGGG |
| | | | | TGTTCGGCGGAGGGACCAAGCTGACCGTCCTA |
| 1356 | VL of CDH19 | artificial | AA | QSVLTQPPSVSGAPGQRVTISCTGSSSNIGTGYAVHWYQQLPG |
| | 14057 | | | TAPKLLIYGNNNRPSGVPDRFSGSKSGTSASLAITGLQAEDEA |
| | | | | DYYCQSYDSRLSGWVFGGGTKLTVL |
| 1357 | VH-VL of | artificial | NT | CAGGTGCAGCTGCAGGAGTCGGGCCCAGGACTGGTGAAGCCTT |
| | CDH19 14057 | | | CGGAGACCCTGTCCCTCACCTGCACTGTCTCTGGTGGCTCCAT |
| | | | | CAGTGGTTACTACTGGAGCTGGATCCGGCAGCCCCCAGGAAAG |
| | | | | GGACTGGAGTGGATTGGATATTTCTCTTACAGTGGGAGCACCA |
| | | | | ACTACAACCCCTCCCTCAAGAGTCGAGTCACCTTATCAGTAGA |
| | | | | CACGTCCAAGAACCAGTTCTCCCTGAAGCTGAGCTCTGTGACC |
| | | | | GCTGCGGACACGGCCGTGTATTACTGTGCGAGGAACTGGGCCT |
| | | | | TCCACTTTGACTTCTGGGGCCAGGGAACCCTGGTCACCGTCTC |
| | | | | TAGTGGTGGCGGAGGATCTGGCGGAGGTGGAAGCGGAGGCGGC |
| | | | | GGATCTCAGTCTGTGCTGACGCAGCCGCCCTCAGTGTCTGGGG |
| | | | | CCCCAGGACAGAGGGTCACCATCTCCTGCACTGGGAGCAGCTC |
| | | | | CAACATCGGGACAGGTTATGCTGTACACTGGTACCAGCAGCTT |
| | | | | CCAGGAACAGCCCCCAAACTCCTCATCTATGGTAACAACAATC |
| | | | | GGCCCTCAGGGGTTCCTGACCGATTCTCTGGCTCCAAGTCTGG |
| | | | | CACCTCAGCCTCCCTGGCCATCACTGGGCTCCAGGCTGAGGAT |
| | | | | GAGGCTGATTATTACTGCCAGTCCTATGACAGCAGACTGAGTG |
| | | | | GTTGGGTGTTCGGCGGAGGGACCAAGCTGACCGTCCTA |
| 1358 | VH-VL of | artificial | AA | QVQLQESGPGLVKPSETLSLTCTVSGGSISGYYWSWIRQPPGK |
| | CDH19 14057 | | | GLEWIGYFSYSGSTNYNPSLKSRVTLSVDTSKNQFSLKLSSVT |
| | | | | AADTAVYYCARNWAFHFDFWGQGTLVTVSSGGGGSGGGGSGGG |
| | | | | GSQSVLTQPPSVSGAPGQRVTISCTGSSSNIGTGYAVHWYQQL |
| | | | | PGTAPKLLIYGNNNRPSGVPDRFSGSKSGTSASLAITGLQAED |
| | | | | EADYYCQSYDSRLSGWVFGGGTKLTVL |
| 1359 | CDH19 14057 | artificial | AA | QVQLQESGPGLVKPSETLSLTCTVSGGSISGYYWSWIRQPPGK |
| | x I2C | | | GLEWIGYFSYSGSTNYNPSLKSRVTLSVDTSKNQFSLKLSSVT |
| | | | | AADTAVYYCARNWAFHFDFWGQGTLVTVSSGGGGSGGGGSGGG |
| | | | | GSQSVLTQPPSVSGAPGQRVTISCTGSSSNIGTGYAVHWYQQL |
| | | | | PGTAPKLLIYGNNNRPSGVPDRFSGSKSGTSASLAITGLQAED |
| | | | | EADYYCQSYDSRLSGWVFGGGTKLTVLSGGGGSEVQLVESGGG |
| | | | | LVQPGGSLKLSCAASGFTFNKYAMNWVRQAPGKGLEWVARIRS |
| | | | | KYNNYATYYADSVKDRFTISRDDSKNTAYLQMNNLKTEDTAVY |
| | | | | YCVRHGNFGNSYISYWAYWGQGTLVTVSSGGGGSGGGGSGGGG |
| | | | | SQTVVTQEPSLTVSPGGTVTLTCGSSTGAVTSGNYPNWVQQKP |
| | | | | GQAPRGLIGGTKFLAPGTPARFSGSLLGGKAALTLSGVQPEDE |
| | | | | AEYYCVLWYSNRWVFGGGTKLTVLHHHHHH |
| 1360 | CDR-H1 of | artificial | AA | SYSWS |
| | CDH19 14049 | | | |
| 1361 | CDR-H2 of | artificial | AA | YIYYSGSTNYNPSLKS |
| | CDH19 14049 | | | |
| 1362 | CDR-H3 of | artificial | AA | NWAFHFDY |
| | CDH19 14049 | | | |
| 1363 | CDR-L1 of | artificial | AA | TGSSSNIGTGYDVH |
| | CDH19 14049 | | | |
| 1364 | CDR-L2 of | artificial | AA | GNSNRPS |
| | CDH19 14049 | | | |
| 1365 | CDR-L3 of | artificial | AA | QSYDSSLSGWV |
| | CDH19 14049 | | | |
| 1366 | VH of CDH19 | artificial | NT | CAGGTGCAGCTGCAGGAGTCGGGCCCAGGACTGGTGAAGCCTT |
| | 14049 | | | CGGAGACCCTGTCCCTCACCTGCACTGTCTCTGGTGGCTCCAT |
| | | | | CAGTAGTTACTCCTGGAGCTGGATCCGGCAGCCCCCAGGGAAG |
| | | | | GGACTGGAGTGGATTGGGTATATCTATTACAGTGGGAGCACCA |
| | | | | ACTACAACCCCTCCCTCAAGAGTCGAGTCACCATATCATTAGA |
| | | | | CACGTCCAAGAACCAGTTCTCCCTGAAGCTGAGCTCTGTGACC |
| | | | | GCTGCGGACACGGCCGTGTATTACTGTGCGAGGAACTGGGCCT |
| | | | | TCCACTTTGACTACTGGGGCCAGGGAACCCTGGTCACCGTCTC |
| | | | | TAGT |
| 1367 | VH of CDH19 | artificial | AA | QVQLQESGPGLVKPSETLSLTCTVSGGSISSYSWSWIRQPPGK |
| | 14049 | | | GLEWIGYIYYSGSTNYNPSLKSRVTISLDTSKNQFSLKLSSVT |
| | | | | AADTAVYYCARNWAFHFDYWGQGTLVTVSS |
| 1368 | VL of CDH19 | artificial | NT | CAGTCTGTGCTGACGCAGCCGCCCTCAGTGTCTGGGGCCCCAG |
| | 14049 | | | GGCAGAGGGTCACCATCTCCTGCACTGGGAGCAGCTCCAATAT |
| | | | | CGGGACAGGTTATGATGTACACTGGTATCAGCAGCTTCCAGGA |
| | | | | ACAGCCCCCAAACTCCTCATCTATGGTAACAGCAATCGGCCCT |
| | | | | CAGGGGTCCCTGACCGATTCTCTGGCTCCAAGTCTGGCACCTC |
| | | | | AGCCTCCCTGGCCATCACTGGGCTCCAGGCTGAGGATGAGGCT |
| | | | | GATTATTACTGCCAGTCCTATGACAGCAGTCTGAGTGGTTGGG |
| | | | | TGTTCGGCGGAGGGACCAGGTTGACCGTCCTA |
| 1369 | VL of CDH19 | artificial | AA | QSVLTQPPSVSGAPGQRVTISCTGSSSNIGTGYDVHWYQQLPG |
| | 14049 | | | TAPKLLIYGNSNRPSGVPDRFSGSKSGTSASLAITGLQAEDEA |
| | | | | DYYCQSYDSSLSGWVFGGGTRLTVL |
| 1370 | VH-VL of | artificial | NT | CAGGTGCAGCTGCAGGAGTCGGGCCCAGGACTGGTGAAGCCTT |
| | CDH19 14049 | | | CGGAGACCCTGTCCCTCACCTGCACTGTCTCTGGTGGCTCCAT |
| | | | | CAGTAGTTACTCCTGGAGCTGGATCCGGCAGCCCCCAGGGAAG |
| | | | | GGACTGGAGTGGATTGGGTATATCTATTACAGTGGGAGCACCA |
| | | | | ACTACAACCCCTCCCTCAAGAGTCGAGTCACCATATCATTAGA |
| | | | | CACGTCCAAGAACCAGTTCTCCCTGAAGCTGAGCTCTGTGACC |
| | | | | GCTGCGGACACGGCCGTGTATTACTGTGCGAGGAACTGGGCCT |
| | | | | TCCACTTTGACTACTGGGGCCAGGGAACCCTGGTCACCGTCTC |
| | | | | TAGTGGTGGCGGAGGATCTGGCGGAGGTGGAAGCGGAGGCGGC |
| | | | | GGATCTCAGTCTGTGCTGACGCAGCCGCCCTCAGTGTCTGGGG |
| | | | | CCCCAGGGCAGAGGGTCACCATCTCCTGCACTGGGAGCAGCTC |
| | | | | CAATATCGGGACAGGTTATGATGTACACTGGTATCAGCAGCTT |
| | | | | CCAGGAACAGCCCCCAAACTCCTCATCTATGGTAACAGCAATC |
| | | | | GGCCCTCAGGGGTCCCTGACCGATTCTCTGGCTCCAAGTCTGG |
| | | | | CACCTCAGCCTCCCTGGCCATCACTGGGCTCCAGGCTGAGGAT |
| | | | | GAGGCTGATTATTACTGCCAGTCCTATGACAGCAGTCTGAGTG |
| | | | | GTTGGGTGTTCGGCGGAGGGACCAGGTTGACCGTCCTA |
| 1371 | VH-VL of | artificial | AA | QVQLQESGPGLVKPSETLSLTCTVSGGSISSYSWSWIRQPPGK |
| | CDH19 14049 | | | GLEWIGYIYYSGSTNYNPSLKSRVTISLDTSKNQFSLKLSSVT |
| | | | | AADTAVYYCARNWAFHFDYWGQGTLVTVSSGGGGSGGGGSGGG |
| | | | | GSQSVLTQPPSVSGAPGQRVTISCTGSSSNIGTGYDVHWYQQL |
| | | | | PGTAPKLLIYGNSNRPSGVPDRFSGSKSGTSASLAITGLQAED |
| | | | | EADYYCQSYDSSLSGWVFGGGTRLTVL |
| 1372 | CDH19 14049 | artificial | AA | QVQLQESGPGLVKPSETLSLTCTVSGGSISSYSWSWIRQPPGK |
| | x I2C | | | GLEWIGYIYYSGSTNYNPSLKSRVTISLDTSKNQFSLKLSSVT |
| | | | | AADTAVYYCARNWAFHFDYWGQGTLVTVSSGGGGSGGGGSGGG |
| | | | | GSQSVLTQPPSVSGAPGQRVTISCTGSSSNIGTGYDVHWYQQL |
| | | | | PGTAPKLLIYGNSNRPSGVPDRFSGSKSGTSASLAITGLQAED |
| | | | | EADYYCQSYDSSLSGWVFGGGTRLTVLSGGGGSEVQLVESGGG |
| | | | | LVQPGGSLKLSCAASGFTFNKYAMNWVRQAPGKGLEWVARIRS |
| | | | | KYNNYATYYADSVKDRFTISRDDSKNTAYLQMNNLKTEDTAVY |
| | | | | YCVRHGNFGNSYISYWAYWGQGTLVTVSSGGGGSGGGGSGGGG |
| | | | | SQTVVTQEPSLTVSPGGTVTLTCGSSTGAVTSGNYPNWVQQKP |
| | | | | GQAPRGLIGGTKFLAPGTPARFSGSLLGGKAALTLSGVQPEDE |
| | | | | AEYYCVLWYSNRWVFGGGTKLTVLHHHHHH |
| 1373 | CDR-H1 of | artificial | AA | SYGMH |
| | CDH19 14302 | | | |
| 1374 | CDR-H2 of | artificial | AA | FIWYDGSNKYYADSVKD |
| | CDH19 14302 | | | |
| 1375 | CDR-H3 of | artificial | AA | RAGIIGTIGYYYGMDV |
| | CDH19 14302 | | | |
| 1376 | CDR-L1 of | artificial | AA | SGDRLGEKYTS |
| | CDH19 14302 | | | |
| 1377 | CDR-L2 of | artificial | AA | QDTKRPS |
| | CDH19 14302 | | | |
| 1378 | CDR-L3 of | artificial | AA | QAWESSTVV |
| | CDH19 14302 | | | |
| 1379 | VH of CDH19 | artificial | NT | CAGGTGCAGTTGGTGGAGTCTGGGGGAGGCGTGGTCCAGCCTG |
| | 14302 | | | GGGGGTCCCTGAGACTCTCCTGTGCAGCGTCTGGATTCACCTT |
| | | | | CAGTAGCTATGGCATGCACTGGGTCCGCCAGGCTCCAGGCAAG |
| | | | | GGGCTGGAGTGGGTGGCATTTATATGGTATGATGGAAGTAATA |
| | | | | AATACTATGCAGACTCCGTGAAGGACCGATTCACCATCTCCAG |
| | | | | AGACAATTCCAAGAACACGCTGTATCTGCAAATGAATAGCCTG |
| | | | | AGAGCTGAGGACACGGCTGTGTATTACTGTGCGAGAAGGGCCG |
| | | | | GTATAATAGGAACTATAGGCTACTACTACGGTATGGACGTCTG |
| | | | | GGGCCAAGGGACCACGGTCACCGTCTCTAGT |
| 1380 | VH of CDH19 | artificial | AA | QVQLVESGGGVVQPGGSLRLSCAASGFTFSSYGMHWVRQAPGK |
| | 14302 | | | GLEWVAFIWYDGSNKYYADSVKDRFTISRDNSKNTLYLQMNSL |
| | | | | RAEDTAVYYCARRAGIIGTIGYYYGMDVWGQGTTVTVSS |
| 1381 | VL of CDH19 | artificial | nt | TCCTATGAACTGACTCAGCCACCCTCAGTGTCCGTGTCCCCAG |
| | 14302 | | | GACAGACAGCCAGCATCACCTGCTCTGGAGATAGGTTGGGGGA |
| | | | | AAAATATACTAGCTGGTATCAGCAGAGGCCAGGCCAGTCCCCT |
| | | | | TTGCTGGTCATCTATCAAGATACCAAGCGGCCCTCAGGGATCC |
| | | | | CTGAGCGATTCTCTGGCTCCAACTCTGGTAACACAGCCACTCT |
| | | | | GACCATCAGCGGGACCCAGGCTATGGATGAGGCTGACTATTAC |
| | | | | TGTCAGGCGTGGGAGAGCAGCACTGTGGTATTCGGCGGAGGGA |
| | | | | CCAAGCTGACCGTCCTA |
| 1382 | VL of CDH19 | artificial | AA | SYELTQPPSVSVSPGQTASITCSGDRLGEKYTSWYQQRPGQSP |
| | 14302 | | | LLVIYQDTKRPSGIPERFSGSNSGNTATLTISGTQAMDEADYY |
| | | | | CQAWESSTVVFGGGTKLTVL |
| 1383 | VH-VL of | artificial | nt | CAGGTGCAGTTGGTGGAGTCTGGGGGAGGCGTGGTCCAGCCTG |
| | CDH19 14302 | | | GGGGGTCCCTGAGACTCTCCTGTGCAGCGTCTGGATTCACCTT |
| | | | | CAGTAGCTATGGCATGCACTGGGTCCGCCAGGCTCCAGGCAAG |
| | | | | GGGCTGGAGTGGGTGGCATTTATATGGTATGATGGAAGTAATA |
| | | | | AATACTATGCAGACTCCGTGAAGGACCGATTCACCATCTCCAG |
| | | | | AGACAATTCCAAGAACACGCTGTATCTGCAAATGAATAGCCTG |
| | | | | AGAGCTGAGGACACGGCTGTGTATTACTGTGCGAGAAGGGCCG |
| | | | | GTATAATAGGAACTATAGGCTACTACTACGGTATGGACGTCTG |
| | | | | GGGCCAAGGGACCACGGTCACCGTCTCTAGTGGTGGCGGAGGA |
| | | | | TCTGGCGGAGGTGGAAGCGGAGGCGGCGGATCTTCCTATGAAC |
| | | | | TGACTCAGCCACCCTCAGTGTCCGTGTCCCCAGGACAGACAGC |
| | | | | CAGCATCACCTGCTCTGGAGATAGGTTGGGGGAAAAATATACT |
| | | | | AGCTGGTATCAGCAGAGGCCAGGCCAGTCCCCTTTGCTGGTCA |
| | | | | TCTATCAAGATACCAAGCGGCCCTCAGGGATCCCTGAGCGATT |
| | | | | CTCTGGCTCCAACTCTGGTAACACAGCCACTCTGACCATCAGC |
| | | | | GGGACCCAGGCTATGGATGAGGCTGACTATTACTGTCAGGCGT |
| | | | | GGGAGAGCAGCACTGTGGTATTCGGCGGAGGGACCAAGCTGAC |
| | | | | CGTCCTA |
| 1384 | VH-VL of | artificial | AA | QVQLVESGGGVVQPGGSLRLSCAASGFTFSSYGMHWVRQAPGK |
| | CDH19 14302 | | | GLEWVAFIWYDGSNKYYADSVKDRFTISRDNSKNTLYLQMNSL |
| | | | | RAEDTAVYYCARRAGIIGTIGYYYGMDVWGQGTTVTVSSGGGG |
| | | | | SGGGGSGGGGSSYELTQPPSVSVSPGQTASITCSGDRLGEKYT |
| | | | | SWYQQRPGQSPLLVIYQDTKRPSGIPERFSGSNSGNTATLTIS |
| | | | | GTQAMDEADYYCQAWESSTVVFGGGTKLTVL |
| 1385 | CDH19 14302 | artificial | aa | QVQLVESGGGVVQPGGSLRLSCAASGFTFSSYGMHWVRQAPGK |
| | x I2C | | | GLEWVAFIWYDGSNKYYADSVKDRFTISRDNSKNTLYLQMNSL |
| | | | | RAEDTAVYYCARRAGIIGTIGYYYGMDVWGQGTTVTVSSGGGG |
| | | | | SGGGGSGGGGSSYELTQPPSVSVSPGQTASITCSGDRLGEKYT |
| | | | | SWYQQRPGQSPLLVIYQDTKRPSGIPERFSGSNSGNTATLTIS |
| | | | | GTQAMDEADYYCQAWESSTVVFGGGTKLTVLSGGGGSEVQLVE |
| | | | | SGGGLVQPGGSLKLSCAASGFTFNKYAMNWVRQAPGKGLEWVA |
| | | | | RIRSKYNNYATYYADSVKDRFTISRDDSKNTAYLQMNNLKTED |
| | | | | TAVYYCVRHGNFGNSYISYWAYWGQGTLVTVSSGGGGSGGGGS |
| | | | | GGGGSQTVVTQEPSLTVSPGGTVTLTCGSSTGAVTSGNYPNWV |
| | | | | QQKPGQAPRGLIGGTKFLAPGTPARFSGSLLGGKAALTLSGVQ |
| | | | | PEDEAEYYCVLWYSNRWVFGGGTKLTVLHHHHHH |
| 1386 | CDR-H1 of | artificial | AA | SYGMH |
| | CDH19 14303 | | | |
| 1387 | CDR-H2 of | artificial | AA | FIWYEGSNKYYAESVKD |
| | CDH19 14303 | | | |
| 1388 | CDR-H3 of | artificial | AA | RAGIIGTIGYYYGMDV |
| | CDH19 14303 | | | |
| 1389 | CDR-L1 of | artificial | AA | SGDRLGEKYTS |
| | CDH19 14303 | | | |
| 1390 | CDR-L2 of | artificial | AA | QDTKRPS |
| | CDH19 14303 | | | |
| 1391 | CDR-L3 of | artificial | AA | QAWESSTVV |
| | CDH19 14303 | | | |
| 1392 | VH of CDH19 | artificial | nt | CAGGTGCAGTTGGTGGAGTCTGGGGGAGGCGTGGTCCAGCCTG |
| | 14303 | | | GGAGGTCCCTGAGACTCTCCTGTGCAGCGTCTGGATTCACCTT |
| | | | | CAGTAGCTATGGCATGCACTGGGTCCGCCAGGCTCCAGGCAAG |
| | | | | GGGCTGGAGTGGGTGGCATTTATATGGTATGAGGGAAGTAATA |
| | | | | AATACTATGCAGAGTCCGTGAAGGACCGATTCACCATCTCCAG |
| | | | | AGACAATTCCAAGAACACGCTGTATCTGCAAATGAAAAGCCTG |
| | | | | AGAGCTGAGGACACGGCTGTGTATTACTGTGCGAGAAGGGCCG |
| | | | | GTATAATAGGAACTATAGGCTACTACTACGGTATGGACGTCTG |
| | | | | GGGCCAAGGGACCACGGTCACCGTCTCTAGT |
| 1393 | VH of CDH19 | artificial | AA | QVQLVESGGGVVQPGRSLRLSCAASGFTFSSYGMHWVRQAPGK |
| | 14303 | | | GLEWVAFIWYEGSNKYYAESVKDRFTISRDNSKNTLYLQMKSL |
| | | | | RAEDTAVYYCARRAGIIGTIGYYYGMDVWGQGTTVTVSS |
| 1394 | VL of CDH19 | artificial | nt | TCCTATGAACTGACTCAGCCACCCTCAGTGTCCGTGTCCCCAG |
| | 14303 | | | GACAGACAGCCAGCATCACCTGCTCTGGAGATAGGTTGGGGGA |
| | | | | AAAATATACTAGCTGGTATCAGCAGAGGCCAGGCCAGTCCCCT |
| | | | | TTGCTGGTCATCTATCAAGATACCAAGCGGCCCTCAGGGATCC |
| | | | | CTGAGCGATTCTCTGGCTCCAACTCTGGTAACACAGCCACTCT |
| | | | | GACCATCAGCGGGACCCAGGCTATGGATGAGGCTGACTATTAC |
| | | | | TGTCAGGCGTGGGAGAGCAGCACTGTGGTATTCGGCGGAGGGA |
| | | | | CCAAGCTGACCGTCCTA |
| 1395 | VL of CDH19 | artificial | AA | SYELTQPPSVSVSPGQTASITCSGDRLGEKYTSWYQQRPGQSP |
| | 14303 | | | LLVIYQDTKRPSGIPERFSGSNSGNTATLTISGTQAMDEADYY |
| | | | | CQAWESSTVVFGGGTKLTVL |
| 1396 | VH-VL of | artificial | nt | CAGGTGCAGTTGGTGGAGTCTGGGGGAGGCGTGGTCCAGCCTG |
| | CDH19 14303 | | | GGAGGTCCCTGAGACTCTCCTGTGCAGCGTCTGGATTCACCTT |
| | | | | CAGTAGCTATGGCATGCACTGGGTCCGCCAGGCTCCAGGCAAG |
| | | | | GGGCTGGAGTGGGTGGCATTTATATGGTATGAGGGAAGTAATA |
| | | | | AATACTATGCAGAGTCCGTGAAGGACCGATTCACCATCTCCAG |
| | | | | AGACAATTCCAAGAACACGCTGTATCTGCAAATGAAAAGCCTG |
| | | | | AGAGCTGAGGACACGGCTGTGTATTACTGTGCGAGAAGGGCCG |
| | | | | GTATAATAGGAACTATAGGCTACTACTACGGTATGGACGTCTG |
| | | | | GGGCCAAGGGACCACGGTCACCGTCTCTAGTGGTGGCGGAGGA |
| | | | | TCTGGCGGAGGTGGAAGCGGAGGCGGCGGATCTTCCTATGAAC |
| | | | | TGACTCAGCCACCCTCAGTGTCCGTGTCCCCAGGACAGACAGC |
| | | | | CAGCATCACCTGCTCTGGAGATAGGTTGGGGGAAAAATATACT |
| | | | | AGCTGGTATCAGCAGAGGCCAGGCCAGTCCCCTTTGCTGGTCA |
| | | | | TCTATCAAGATACCAAGCGGCCCTCAGGGATCCCTGAGCGATT |
| | | | | CTCTGGCTCCAACTCTGGTAACACAGCCACTCTGACCATCAGC |
| | | | | GGGACCCAGGCTATGGATGAGGCTGACTATTACTGTCAGGCGT |
| | | | | GGGAGAGCAGCACTGTGGTATTCGGCGGAGGGACCAAGCTGAC |
| | | | | CGTCCTA |
| 1397 | VH-VL of | artificial | AA | QVQLVESGGGVVQPGRSLRLSCAASGFTFSSYGMHWVRQAPGK |
| | CDH19 14303 | | | GLEWVAFIWYEGSNKYYAESVKDRFTISRDNSKNTLYLQMKSL |
| | | | | RAEDTAVYYCARRAGIIGTIGYYYGMDVWGQGTTVTVSSGGGG |
| | | | | SGGGGSGGGGSSYELTQPPSVSVSPGQTASITCSGDRLGEKYT |
| | | | | SWYQQRPGQSPLLVIYQDTKRPSGIPERFSGSNSGNTATLTIS |
| | | | | GTQAMDEADYYCQAWESSTVVFGGGTKLTVL |
| 1398 | CDH19 14303 | artificial | aa | QVQLVESGGGVVQPGRSLRLSCAASGFTFSSYGMHWVRQAPGK |
| | x I2C | | | GLEWVAFIWYEGSNKYYAESVKDRFTISRDNSKNTLYLQMKSL |
| | | | | RAEDTAVYYCARRAGIIGTIGYYYGMDVWGQGTTVTVSSGGGG |
| | | | | SGGGGSGGGGSSYELTQPPSVSVSPGQTASITCSGDRLGEKYT |
| | | | | SWYQQRPGQSPLLVIYQDTKRPSGIPERFSGSNSGNTATLTIS |
| | | | | GTQAMDEADYYCQAWESSTVVFGGGTKLTVLSGGGGSEVQLVE |
| | | | | SGGGLVQPGGSLKLSCAASGFTFNKYAMNWVRQAPGKGLEWVA |
| | | | | RIRSKYNNYATYYADSVKDRFTISRDDSKNTAYLQMNNLKTED |
| | | | | TAVYYCVRHGNFGNSYISYWAYWGQGTLVTVSSGGGGSGGGGS |
| | | | | GGGGSQTVVTQEPSLTVSPGGTVTLTCGSSTGAVTSGNYPNWV |
| | | | | QQKPGQAPRGLIGGTKFLAPGTPARFSGSLLGGKAALTLSGVQ |
| | | | | PEDEAEYYCVLWYSNRWVFGGGTKLTVLHHHHHH |
| 1399 | CDR-H1 of | artificial | AA | RYGIH |
| | CDH19 14078 | | | |
| 1400 | CDR-H2 of | artificial | AA | VIWYDGSNKYYADSVKG |
| | CDH19 14078 | | | |
| 1401 | CDR-H3 of | artificial | AA | RAGIPGTTGYYYGMDV |
| | CDH19 14078 | | | |
| 1402 | CDR-L1 of | artificial | AA | SGDRLGEKYVS |
| | CDH19 14078 | | | |
| 1403 | CDR-L2 of | artificial | AA | QDNKWPS |
| | CDH19 14078 | | | |
| 1404 | CDR-L3 of | artificial | AA | QAWDSSTVV |
| | CDH19 14078 | | | |
| 1405 | VH of CDH19 | artificial | nt | CAGGTGCAGCTGGTGGAGTCTGGGGGAGGCGTGGTCCAGCCTG |
| | 14078 | | | GGGGGTCCCTGAGACTCTCCTGTGCAGCGTCTGGATTCACCTT |
| | | | | CAGTCGCTATGGCATACACTGGGTCCGCCAGGCTCCAGGCAAG |
| | | | | GGGCTGGAGTGGGTGGCAGTTATATGGTATGATGGAAGTAATA |
| | | | | AATACTATGCAGACTCCGTGAAGGGCCGATTCACCATCTCCAG |
| | | | | AGACAATTCCAAGAACACGCTGTATCTGCAAATGAACAGCCTG |
| | | | | AGAGCCGAGGACTCGGCTGTGTATTACTGTGCGAGAAGGGCCG |
| | | | | GTATACCTGGAACTACGGGCTACTACTATGGTATGGACGTCTG |
| | | | | GGGCCAAGGGACCACGGTCACCGTCTCCTCA |
| 1406 | VH of CDH19 | artificial | AA | QVQLVESGGGVVQPGGSLRLSCAASGFTFSRYGIHWVRQAPGK |
| | 14078 | | | GLEWVAVIWYDGSNKYYADSVKGRFTISRDNSKNTLYLQMNSL |
| | | | | RAEDSAVYYCARRAGIPGTTGYYYGMDVWGQGTTVTVSS |
| 1407 | VL of CDH19 | artificial | nt | TCCTATGAGCTGACTCAGCCACCCTCAGTGTCCGTGTCCCCAG |
| | 14078 | | | GACAGACAGCCAGCATCACCTGCTCTGGAGATAGATTGGGGGA |
| | | | | GAAATATGTTAGCTGGTATCAGCAGAAGCCAGGCCAGTCCCCT |
| | | | | ATACTGGTCATCTATCAAGATAATAAGTGGCCCTCAGGGATCC |
| | | | | CTGAGCGATTCTCTGGCTCCAACTCTGGGAACACAGCCACTCT |
| | | | | GACCATCAGCGGGACCCAGGCTATGGATGAGGCTGACTATTAC |
| | | | | TGTCAGGCGTGGGACAGCAGCACTGTGGTATTCGGCGGGGGGA |
| | | | | CCAAGCTGACCGTCCTA |
| 1408 | VL of CDH19 | artificial | AA | SYELTQPPSVSVSPGQTASITCSGDRLGEKYVSWYQQKPGQSP |
| | 14078 | | | ILVIYQDNKWPSGIPERFSGSNSGNTATLTISGTQAMDEADYY |
| | | | | CQAWDSSTVVFGGGTKLTVL |
| 1409 | VH-VL of | artificial | nt | CAGGTGCAGCTGGTGGAGTCTGGGGGAGGCGTGGTCCAGCCTG |
| | CDH19 14078 | | | GGGGGTCCCTGAGACTCTCCTGTGCAGCGTCTGGATTCACCTT |
| | | | | CAGTCGCTATGGCATACACTGGGTCCGCCAGGCTCCAGGCAAG |
| | | | | GGGCTGGAGTGGGTGGCAGTTATATGGTATGATGGAAGTAATA |
| | | | | AATACTATGCAGACTCCGTGAAGGGCCGATTCACCATCTCCAG |
| | | | | AGACAATTCCAAGAACACGCTGTATCTGCAAATGAACAGCCTG |
| | | | | AGAGCCGAGGACTCGGCTGTGTATTACTGTGCGAGAAGGGCCG |
| | | | | GTATACCTGGAACTACGGGCTACTACTATGGTATGGACGTCTG |
| | | | | GGGCCAAGGGACCACGGTCACCGTCTCCTCAGGTGGCGGAGGA |
| | | | | TCTGGCGGAGGTGGAAGCGGAGGCGGCGGATCTTCCTATGAGC |
| | | | | TGACTCAGCCACCCTCAGTGTCCGTGTCCCCAGGACAGACAGC |
| | | | | CAGCATCACCTGCTCTGGAGATAGATTGGGGGAGAAATATGTT |
| | | | | AGCTGGTATCAGCAGAAGCCAGGCCAGTCCCCTATACTGGTCA |
| | | | | TCTATCAAGATAATAAGTGGCCCTCAGGGATCCCTGAGCGATT |
| | | | | CTCTGGCTCCAACTCTGGGAACACAGCCACTCTGACCATCAGC |
| | | | | GGGACCCAGGCTATGGATGAGGCTGACTATTACTGTCAGGCGT |
| | | | | GGGACAGCAGCACTGTGGTATTCGGCGGGGGGACCAAGCTGAC |
| | | | | CGTCCTA |
| 1410 | VH-VL of | artificial | AA | QVQLVESGGGVVQPGGSLRLSCAASGFTFSRYGIHWVRQAPGK |
| | CDH19 14078 | | | GLEWVAVIWYDGSNKYYADSVKGRFTISRDNSKNTLYLQMNSL |
| | | | | RAEDSAVYYCARRAGIPGTTGYYYGMDVWGQGTTVTVSSGGGG |
| | | | | SGGGGSGGGGSSYELTQPPSVSVSPGQTASITCSGDRLGEKYV |
| | | | | SWYQQKPGQSPILVIYQDNKWPSGIPERFSGSNSGNTATLTIS |
| | | | | GTQAMDEADYYCQAWDSSTVVFGGGTKLTVL |
| 1411 | CDH19 14078 | artificial | aa | QVQLVESGGGVVQPGGSLRLSCAASGFTFSRYGIHWVRQAPGK |
| | x I2C | | | GLEWVAVIWYDGSNKYYADSVKGRFTISRDNSKNTLYLQMNSL |
| | | | | RAEDSAVYYCARRAGIPGTTGYYYGMDVWGQGTTVTVSSGGGG |
| | | | | SGGGGSGGGGSSYELTQPPSVSVSPGQTASITCSGDRLGEKYV |
| | | | | SWYQQKPGQSPILVIYQDNKWPSGIPERFSGSNSGNTATLTIS |
| | | | | GTQAMDEADYYCQAWDSSTVVFGGGTKLTVLSGGGGSEVQLVE |
| | | | | SGGGLVQPGGSLKLSCAASGFTFNKYAMNWVRQAPGKGLEWVA |
| | | | | RIRSKYNNYATYYADSVKDRFTISRDDSKNTAYLQMNNLKTED |
| | | | | TAVYYCVRHGNFGNSYISYWAYWGQGTLVTVSSGGGGSGGGGS |
| | | | | GGGGSQTVVTQEPSLTVSPGGTVTLTCGSSTGAVTSGNYPNWV |
| | | | | QQKPGQAPRGLIGGTKFLAPGTPARFSGSLLGGKAALTLSGVQ |
| | | | | PEDEAEYYCVLWYSNRWVFGGGTKLTVLHHHHHH |
| 1412 | CDR-H1 of | artificial | AA | RYGIH |
| | CDH19 14080 | | | |
| 1413 | CDR-H2 of | artificial | AA | VIWYDGSNKYYADSVKG |
| | CDH19 14080 | | | |
| 1414 | CDR-H3 of | artificial | AA | RAGIPGTTGYYYGMDV |
| | CDH19 14080 | | | |
| 1415 | CDR-L1 of | artificial | AA | SGDRLGEKYVY |
| | CDH19 14080 | | | |
| 1416 | CDR-L2 of | artificial | AA | QDNKWPS |
| | CDH19 14080 | | | |
| 1417 | CDR-L3 of | artificial | AA | QAWDSSTVV |
| | CDH19 14080 | | | |
| 1418 | VH of CDH19 | artificial | nt | CAGGTGCAGCTGGTGGAGTCTGGGGGAGGCGTGGTCCAGCCTG |
| | 14080 | | | GGAGGTCCCTGAGACTCTCCTGTGCAGCGTCTGGATTCACCTT |
| | | | | CAGTCGCTATGGCATACACTGGGTCCGCCAGGCTCCAGGCAAG |
| | | | | GGGCTGGAGTGGGTGGCAGTTATATGGTATGATGGAAGTAATA |
| | | | | AATACTATGCAGACTCCGTGAAGGGCCGATTCACCATCTCCAG |
| | | | | AGACAATTCCAAGAACACGCTGTATCTGCTAATGAACAGCCTG |
| | | | | AGAGCCGAGGACTCGGCTGTGTATTACTGTGCGAGAAGGGCCG |
| | | | | GTATACCTGGAACTACGGGCTACTACTATGGTATGGACGTCTG |
| | | | | GGGCCAAGGGACCACGGTCACCGTCTCCTCA |
| 1419 | VH of CDH19 | artificial | AA | QVQLVESGGGVVQPGRSLRLSCAASGFTFSRYGIHWVRQAPGK |
| | 14080 | | | GLEWVAVIWYDGSNKYYADSVKGRFTISRDNSKNTLYLLMNSL |
| | | | | RAEDSAVYYCARRAGIPGTTGYYYGMDVWGQGTTVTVSS |
| 1420 | VL of CDH19 | artificial | nt | TCCTATGAGCTGACTCAGCCACCCTCAGTGTCCGTGTCCCCAG |
| | 14080 | | | GACAGACAGCCAGCATCACCTGCTCTGGAGATAGATTGGGGGA |
| | | | | GAAATATGTTTACTGGTATCAGCAGAAGCCAGGCCAGTCCCCT |
| | | | | ATACTGGTCATCTATCAAGATAATAAGTGGCCCTCAGGGATCC |
| | | | | CTGAGCGATTCTCTGGCTCCAACTCTGGGAACACAGCCACTCT |
| | | | | GACCATCAGCGGGACCCAGGCTATGGATGAGGCTGACTATTAC |
| | | | | TGTCAGGCGTGGGACAGCAGCACTGTGGTATTCGGCGGGGGGA |
| | | | | CCAAGCTGACCGTCCTA |
| 1421 | VL of CDH19 | artificial | AA | SYELTQPPSVSVSPGQTASITCSGDRLGEKYVYWYQQKPGQSP |
| | 14080 | | | ILVIYQDNKWPSGIPERFSGSNSGNTATLTISGTQAMDEADYY |
| | | | | CQAWDSSTVVFGGGTKLTVL |
| 1422 | VH-VL of | artificial | nt | CAGGTGCAGCTGGTGGAGTCTGGGGGAGGCGTGGTCCAGCCTG |
| | CDH19 14080 | | | GGAGGTCCCTGAGACTCTCCTGTGCAGCGTCTGGATTCACCTT |
| | | | | CAGTCGCTATGGCATACACTGGGTCCGCCAGGCTCCAGGCAAG |
| | | | | GGGCTGGAGTGGGTGGCAGTTATATGGTATGATGGAAGTAATA |
| | | | | AATACTATGCAGACTCCGTGAAGGGCCGATTCACCATCTCCAG |
| | | | | AGACAATTCCAAGAACACGCTGTATCTGCTAATGAACAGCCTG |
| | | | | AGAGCCGAGGACTCGGCTGTGTATTACTGTGCGAGAAGGGCCG |
| | | | | GTATACCTGGAACTACGGGCTACTACTATGGTATGGACGTCTG |
| | | | | GGGCCAAGGGACCACGGTCACCGTCTCCTCAGGTGGCGGAGGA |
| | | | | TCTGGCGGAGGTGGAAGCGGAGGCGGCGGATCTTCCTATGAGC |
| | | | | TGACTCAGCCACCCTCAGTGTCCGTGTCCCCAGGACAGACAGC |
| | | | | CAGCATCACCTGCTCTGGAGATAGATTGGGGGAGAAATATGTT |
| | | | | TACTGGTATCAGCAGAAGCCAGGCCAGTCCCCTATACTGGTCA |
| | | | | TCTATCAAGATAATAAGTGGCCCTCAGGGATCCCTGAGCGATT |
| | | | | CTCTGGCTCCAACTCTGGGAACACAGCCACTCTGACCATCAGC |
| | | | | GGGACCCAGGCTATGGATGAGGCTGACTATTACTGTCAGGCGT |
| | | | | GGGACAGCAGCACTGTGGTATTCGGCGGGGGGACCAAGCTGAC |
| | | | | CGTCCTA |
| 1423 | VH-VL of | artificial | AA | QVQLVESGGGVVQPGRSLRLSCAASGFTFSRYGIHWVRQAPGK |
| | CDH19 14080 | | | GLEWVAVIWYDGSNKYYADSVKGRFTISRDNSKNTLYLLMNSL |
| | | | | RAEDSAVYYCARRAGIPGTTGYYYGMDVWGQGTTVTVSSGGGG |
| | | | | SGGGGSGGGGSSYELTQPPSVSVSPGQTASITCSGDRLGEKYV |
| | | | | YWYQQKPGQSPILVIYQDNKWPSGIPERFSGSNSGNTATLTIS |
| | | | | GTQAMDEADYYCQAWDSSTVVFGGGTKLTVL |
| 1424 | CDH19 14080 | artificial | aa | QVQLVESGGGVVQPGRSLRLSCAASGFTFSRYGIHWVRQAPGK |
| | x I2C | | | GLEWVAVIWYDGSNKYYADSVKGRFTISRDNSKNTLYLLMNSL |
| | | | | RAEDSAVYYCARRAGIPGTTGYYYGMDVWGQGTTVTVSSGGGG |
| | | | | SGGGGSGGGGSSYELTQPPSVSVSPGQTASITCSGDRLGEKYV |
| | | | | YWYQQKPGQSPILVIYQDNKWPSGIPERFSGSNSGNTATLTIS |
| | | | | GTQAMDEADYYCQAWDSSTVVFGGGTKLTVLSGGGGSEVQLVE |
| | | | | SGGGLVQPGGSLKLSCAASGFTFNKYAMNWVRQAPGKGLEWVA |
| | | | | RIRSKYNNYATYYADSVKDRFTISRDDSKNTAYLQMNNLKTED |
| | | | | TAVYYCVRHGNFGNSYISYWAYWGQGTLVTVSSGGGGSGGGGS |
| | | | | GGGGSQTVVTQEPSLTVSPGGTVTLTCGSSTGAVTSGNYPNWV |
| | | | | QQKPGQAPRGLIGGTKFLAPGTPARFSGSLLGGKAALTLSGVQ |
| | | | | PEDEAEYYCVLWYSNRWVFGGGTKLTVLHHHHHH |
| 1425 | CDR-H1 of | artificial | AA | SYSWS |
| | CDH19 13591 | | | |
| 1426 | CDR-H2 of | artificial | AA | YIYYSGSTNYNPSLKS |
| | CDH19 13591 | | | |
| 1427 | CDR-H3 of | artificial | AA | NWAFHFDY |
| | CDH19 13591 | | | |
| 1428 | CDR-L1 of | artificial | AA | TGSSSNIGTGYDVH |
| | CDH19 13591 | | | |
| 1429 | CDR-L2 of | artificial | AA | GNSNRPS |
| | CDH19 13591 | | | |
| 1430 | CDR-L3 of | artificial | AA | QSYDSSLSGWV |
| | CDH19 13591 | | | |
| 1431 | VH of CDH19 | artificial | NT | CAGGTGCAGCTGCAGGAGTCGGGCCCAGGACTGGTGAAGCCTT |
| | 13591 | | | CGGAGACCCTGTCCCTCACCTGCACTGTCTCTGGTGGCTCCAT |
| | | | | CAGTAGTTACTCCTGGAGCTGGATCCGGCAGCCCCCAGGGAAG |
| | | | | GGACTGGAGTGGATTGGGTATATCTATTACAGTGGGAGCACCA |
| | | | | ACTACAACCCCTCCCTCAAGAGTCGAGTCACCATATCATTAGA |
| | | | | CACGTCCAAGAACCAGTTCTCCCTGAAGCTGAGCTCTGTGACC |
| | | | | GCTGCGGACACGGCCGTGTATTACTGTGCGAGGAACTGGGCCT |
| | | | | TCCACTTTGACTACTGGGGCCAGGGAACCCTGGTCACCGTCTC |
| | | | | TAGT |
| 1432 | VH of CDH19 | artificial | AA | QVQLQESGPGLVKPSETLSLTCTVSGGSISSYSWSWIRQPPGK |
| | 13591 | | | GLEWIGYIYYSGSTNYNPSLKSRVTISLDTSKNQFSLKLSSVT |
| | | | | AADTAVYYCARNWAFHFDYWGQGTLVTVSS |
| 1433 | VL of CDH19 | artificial | NT | CAGTCTGTGCTGACGCAGCCGCCCTCAGTGTCTGGGGCCCCAG |
| | 13591 | | | GGCAGAGGGTCACCATCTCCTGCACTGGGAGCAGCTCCAATAT |
| | | | | CGGGACAGGTTATGATGTACACTGGTATCAGCAGCTTCCAGGA |
| | | | | ACAGCCCCCAAACTCCTCATCCATGGTAACAGCAATCGGCCCT |
| | | | | CAGGGGTCCCTGACCGATTCTCTGGCTCCAAGTCTGGCACCTC |
| | | | | AGCCTCCCTGGCCATCACTGGGCTCCAGGCTGAGGATGAGGCT |
| | | | | GATTATTACTGCCAGTCCTATGACAGCAGTCTGAGTGGTTGGG |
| | | | | TGTTCGGCGGAGGGACCAGGTTGACCGTCCTA |
| 1434 | VL of CDH19 | artificial | AA | QSVLTQPPSVSGAPGQRVTISCTGSSSNIGTGYDVHWYQQLPG |
| | 13591 | | | TAPKLLIHGNSNRPSGVPDRFSGSKSGTSASLAITGLQAEDEA |
| | | | | DYYCQSYDSSLSGWVFGGGTRLTVL |
| 1435 | VH-VL of | artificial | NT | CAGGTGCAGCTGCAGGAGTCGGGCCCAGGACTGGTGAAGCCTT |
| | CDH19 1591 | | | CGGAGACCCTGTCCCTCACCTGCACTGTCTCTGGTGGCTCCAT |
| | | | | CAGTAGTTACTCCTGGAGCTGGATCCGGCAGCCCCCAGGGAAG |
| | | | | GGACTGGAGTGGATTGGGTATATCTATTACAGTGGGAGCACCA |
| | | | | ACTACAACCCCTCCCTCAAGAGTCGAGTCACCATATCATTAGA |
| | | | | CACGTCCAAGAACCAGTTCTCCCTGAAGCTGAGCTCTGTGACC |
| | | | | GCTGCGGACACGGCCGTGTATTACTGTGCGAGGAACTGGGCCT |
| | | | | TCCACTTTGACTACTGGGGCCAGGGAACCCTGGTCACCGTCTC |
| | | | | TAGTGGTGGCGGAGGATCTGGCGGAGGTGGAAGCGGAGGCGGC |
| | | | | GGATCTCAGTCTGTGCTGACGCAGCCGCCCTCAGTGTCTGGGG |
| | | | | CCCCAGGGCAGAGGGTCACCATCTCCTGCACTGGGAGCAGCTC |
| | | | | CAATATCGGGACAGGTTATGATGTACACTGGTATCAGCAGCTT |
| | | | | CCAGGAACAGCCCCCAAACTCCTCATCCATGGTAACAGCAATC |
| | | | | GGCCCTCAGGGGTCCCTGACCGATTCTCTGGCTCCAAGTCTGG |
| | | | | CACCTCAGCCTCCCTGGCCATCACTGGGCTCCAGGCTGAGGAT |
| | | | | GAGGCTGATTATTACTGCCAGTCCTATGACAGCAGTCTGAGTG |
| | | | | GTTGGGTGTTCGGCGGAGGGACCAGGTTGACCGTCCTA |
| 1436 | VH-VL of | artificial | AA | QVQLQESGPGLVKPSETLSLTCTVSGGSISSYSWSWIRQPPGK |
| | CDH19 13591 | | | GLEWIGYIYYSGSTNYNPSLKSRVTISLDTSKNQFSLKLSSVT |
| | | | | AADTAVYYCARNWAFHFDYWGQGTLVTVSSGGGGSGGGGSGGG |
| | | | | GSQSVLTQPPSVSGAPGQRVTISCTGSSSNIGTGYDVHWYQQL |
| | | | | PGTAPKLLIHGNSNRPSGVPDRFSGSKSGTSASLAITGLQAED |
| | | | | EADYYCQSYDSSLSGWVFGGGTRLTVL |
| 1437 | CDH19 13591 | artificial | AA | QVQLQESGPGLVKPSETLSLTCTVSGGSISSYSWSWIRQPPGK |
| | x I2C | | | GLEWIGYIYYSGSTNYNPSLKSRVTISLDTSKNQFSLKLSSVT |
| | | | | AADTAVYYCARNWAFHFDYWGQGTLVTVSSGGGGSGGGGSGGG |
| | | | | GSQSVLTQPPSVSGAPGQRVTISCTGSSSNIGTGYDVHWYQQL |
| | | | | PGTAPKLLIHGNSNRPSGVPDRFSGSKSGTSASLAITGLQAED |
| | | | | EADYYCQSYDSSLSGWVFGGGTRLTVLSGGGGSEVQLVESGGG |
| | | | | LVQPGGSLKLSCAASGFTFNKYAMNWVRQAPGKGLEWVARIRS |
| | | | | KYNNYATYYADSVKDRFTISRDDSKNTAYLQMNNLKTEDTAVY |
| | | | | YCVRHGNFGNSYISYWAYWGQGTLVTVSSGGGGSGGGGSGGGG |
| | | | | SQTVVTQEPSLTVSPGGTVTLTCGSSTGAVTSGNYPNWVQQKP |
| | | | | GQAPRGLIGGTKFLAPGTPARFSGSLLGGKAALTLSGVQPEDE |
| | | | | AEYYCVLWYSNRWVFGGGTKLTVLHHHHHH |
| 1438 | CDR-H1 of | artificial | AA | SYSWS |
| | CDH19 14299 | | | |
| 1439 | CDR-H2 of | artificial | AA | YIYYSGSTNYNPSLKS |
| | CDH19 14299 | | | |
| 1440 | CDR-H3 of | artificial | AA | NWAFHFDY |
| | CDH19 14299 | | | |
| 1441 | CDR-L1 of | artificial | AA | TGSSSNIGTGYDVH |
| | CDH19 14299 | | | |
| 1442 | CDR-L2 of | artificial | AA | GNSNRPS |
| | CDH19 14299 | | | |
| 1443 | CDR-L3 of | artificial | AA | QSYDSSLSGWV |
| | CDH19 14299 | | | |
| 1444 | VH of CDH19 | artificial | NT | CAGGTGCAGCTGCAGGAGTCGGGCCCAGGACTGGTGAAGCCTT |
| | 14299 | | | CGGAGACCCTGTCCCTCACCTGCACTGTCTCTGGTGGCTCCAT |
| | | | | CAGTAGTTACTCCTGGAGCTGGATCCGGCAGCCCCCAGGGAAG |
| | | | | GGACTGGAGTGGATTGGGTATATCTATTACAGTGGGAGCACCA |
| | | | | ACTACAACCCCTCCCTCAAGAGTCGAGTCACCATATCATTAGA |
| | | | | CACGTCCAAGAACCAGTTCTCCCTGAAGCTGAGCTCTGTGACC |
| | | | | GCTGCGGACACGGCCGTGTATTACTGTGCGAGGAACTGGGCCT |
| | | | | TCCACTTTGACTACTGGGGCCAGGGAACCCTGGTCACCGTCTC |
| | | | | TAGT |
| 1445 | VH of CDH19 | artificial | AA | QVQLQESGPGLVKPSETLSLTCTVSGGSISSYSWSWIRQPPGK |
| | 14299 | | | GLEWIGYIYYSGSTNYNPSLKSRVTISLDTSKNQFSLKLSSVT |
| | | | | AADTAVYYCARNWAFHFDYWGQGTLVTVSS |
| 1446 | VL of CDH19 | artificial | NT | CAGTCTGTGCTGACGCAGCCGCCCTCAGTGTCTGGGGCCCCAG |
| | 14299 | | | GGCAGAGGGTCACCATCTCCTGCACTGGGAGCAGCTCCAATAT |
| | | | | CGGGACAGGTTATGATGTACACTGGTATCAGCAGCTTCCAGGA |
| | | | | ACAGCCCCCAAACTCCTCATCCATGGTAACAGCAATCGGCCCT |
| | | | | CAGGGGTCCCTGACCGATTCTCTGGCTCCAAGTCTGGCACCTC |
| | | | | AGCCTCCCTGGCCATCACTGGGCTCCAGGCTGAGGATGAGGCT |
| | | | | GATTATTACTGCCAGTCCTATGACAGCAGTCTGAGTGGTTGGG |
| | | | | TGTTCGGCGGAGGGACCAGGTTGACCGTCCTA |
| 1447 | VL of CDH19 | artificial | AA | QSVLTQPPSVSGAPGQRVTISCTGSSSNIGTGYDVHWYQQLPG |
| | 14299 | | | TAPKLLIHGNSNRPSGVPDRFSGSKSGTSASLAITGLQAEDEA |
| | | | | DYYCQSYDSSLSGWVFGGGTRLTVL |
| 1448 | VH-VL of | artificial | NT | CAGGTGCAGCTGCAGGAGTCGGGCCCAGGACTGGTGAAGCCTT |
| | CDH19 14299 | | | CGGAGACCCTGTCCCTCACCTGCACTGTCTCTGGTGGCTCCAT |
| | | | | CAGTAGTTACTCCTGGAGCTGGATCCGGCAGCCCCCAGGGAAG |
| | | | | GGACTGGAGTGGATTGGGTATATCTATTACAGTGGGAGCACCA |
| | | | | ACTACAACCCCTCCCTCAAGAGTCGAGTCACCATATCATTAGA |
| | | | | CACGTCCAAGAACCAGTTCTCCCTGAAGCTGAGCTCTGTGACC |
| | | | | GCTGCGGACACGGCCGTGTATTACTGTGCGAGGAACTGGGCCT |
| | | | | TCCACTTTGACTACTGGGGCCAGGGAACCCTGGTCACCGTCTC |
| | | | | TAGTGGTGGCGGAGGATCTGGCGGAGGTGGAAGCGGAGGCGGC |
| | | | | GGATCTCAGTCTGTGCTGACGCAGCCGCCCTCAGTGTCTGGGG |
| | | | | CCCCAGGGCAGAGGGTCACCATCTCCTGCACTGGGAGCAGCTC |
| | | | | CAATATCGGGACAGGTTATGATGTACACTGGTATCAGCAGCTT |
| | | | | CCAGGAACAGCCCCCAAACTCCTCATCCATGGTAACAGCAATC |
| | | | | GGCCCTCAGGGGTCCCTGACCGATTCTCTGGCTCCAAGTCTGG |
| | | | | CACCTCAGCCTCCCTGGCCATCACTGGGCTCCAGGCTGAGGAT |
| | | | | GAGGCTGATTATTACTGCCAGTCCTATGACAGCAGTCTGAGTG |
| | | | | GTTGGGTGTTCGGCGGAGGGACCAGGTTGACCGTCCTA |
| 1449 | VH-VL of | artificial | AA | QVQLQESGPGLVKPSETLSLTCTVSGGSISSYSWSWIRQPPGK |
| | CDH19 14299 | | | GLEWIGYIYYSGSTNYNPSLKSRVTISLDTSKNQFSLKLSSVT |
| | | | | AADTAVYYCARNWAFHFDYWGQGTLVTVSSGGGGSGGGGSGGG |
| | | | | GSQSVLTQPPSVSGAPGQRVTISCTGSSSNIGTGYDVHWYQQL |
| | | | | PGTAPKLLIHGNSNRPSGVPDRFSGSKSGTSASLAITGLQAED |
| | | | | EADYYCQSYDSSLSGWVFGGGTRLTVL |
| 1450 | CDH19 14299 | artificial | AA | QVQLQESGPGLVKPSETLSLTCTVSGGSISSYSWSWIRQPPGK |
| | x I2C | | | GLEWIGYIYYSGSTNYNPSLKSRVTISLDTSKNQFSLKLSSVT |
| | | | | AADTAVYYCARNWAFHFDYWGQGTLVTVSSGGGGSGGGGSGGG |
| | | | | GSQSVLTQPPSVSGAPGQRVTISCTGSSSNIGTGYDVHWYQQL |
| | | | | PGTAPKLLIHGNSNRPSGVPDRFSGSKSGTSASLAITGLQAED |
| | | | | EADYYCQSYDSSLSGWVFGGGTRLTVLSGGGGSEVQLVESGGG |
| | | | | LVQPGGSLKLSCAASGFTFNKYAMNWVRQAPGKGLEWVARIRS |
| | | | | KYNNYATYYADSVKDRFTISRDDSKNTAYLQMNNLKTEDTAVY |
| | | | | YCVRHGNFGNSYISYWAYWGQGTLVTVSSGGGGSGGGGSGGGG |
| | | | | SQTVVTQEPSLTVSPGGTVTLTCGSSTGAVTSGNYPNWVQQKP |
| | | | | GQAPRGLIGGTKFLAPGTPARFSGSLLGGKAALTLSGVQPEDE |
| | | | | AEYYCVLWYSNRWVFGGGTKLTVLHHHHHH |
| 1451 | ckCDH19(1-43) | artificial | aa | MNCSTFLSLVLALVQLQLCSPTTQIFSAQKTDQSYTTIRRVKR |
| | ::FLAG::ckCDH19 | | | DYKDDDDKGWVWEPLFVTEEETSTMPMYVGQLKSDLDKEDGSL |
| | (44-776) | | | QYILTGEGADSIFFINEHGKIYVRQKLDREKKSFYILRAQVIN |
| | | | | RKTRHPIEPDSEFIIKVRDINDHEPQFLDGPYVATVPEMSPEG |
| | | | | TSVTQVTATDGDDPSYGNNARLLYSLIQGQPYFSVEPKTGVIR |
| | | | | MTSQMDRETKDQYLVVIQAKDMVGQAGAFSATATVTINLSDVN |
| | | | | DNPPKFQQRLYYLNVSEEAPVGTTVGRLLAEDSDIGENAAMNY |
| | | | | FIEEDSSDVFGIITDRETQEGIIILKKRVDYESKRKHSVRVKA |
| | | | | VNRYIDDRFLKEGPFEDITIVQISVVDADEPPVFTLESYVMEI |
| | | | | AEGVVSGSLVGTVSARDLDNDDSSVRYSIVQGLHLKRLFSINE |
| | | | | HNGTIITTEPLDREKASWHNITVTATETRNPEKISEANVYIQV |
| | | | | LDVNDHAPEFSKYYETFVCENAVPGQLIQNISAVDKDDSAENH |
| | | | | RFYFSLAQATNSSHFTVKDNQDNTAGIFTAGSGFSRKEQFYFF |
| | | | | LPILILDNGSPPLTSTNTLTVTVCDCDTEVNTLYCRYGAFLYS |
| | | | | IGLSTEALVAVLACLLILLVFFLAIIGIRQQRKKTLFSEKVEE |
| | | | | FRENIVRYDDEGGGEEDTEAFDISALRTRAVLRTHKPRKKITT |
| | | | | EIHSLYRQSLQVGPDSAIFRQFISEKLEEANTDPSVPPYDSLQ |
| | | | | TYAFEGTGSLAGSLSSLGSNTSDVDQNYEYLVGWGPPFKQLAG |
| | | | | MYTSQRSTRD |
| 1452 | huCDH19(1-43) | artificial | aa | MNCYLLLRFMLGIPLLWPCLGATENSQTKKVKQPVRSHLRVKR |
| | ::FLAG::hu | | | DYKDDDDKGWVWNQFFVPEEMNTTSHHIGQLRSDLDNGNNSFQ |
| | (44-141) | | | YKLLGAGAGSTFIIDERTGDIYAIQKLDREERSLYILRAQVID |
| | ::ckCDH19 | | | IATGRAVEPESEFVIKVSDINDHEPQFLDGPYVATVPEMSPEG |
| | (142-776) | | | TSVTQVTATDGDDPSYGNNARLLYSLIQGQPYFSVEPKTGVIR |
| | | | | MTSQMDRETKDQYLVVIQAKDMVGQAGAFSATATVTINLSDVN |
| | | | | DNPPKFQQRLYYLNVSEEAPVGTTVGRLLAEDSDIGENAAMNY |
| | | | | FIEEDSSDVFGIITDRETQEGIIILKKRVDYESKRKHSVRVKA |
| | | | | VNRYIDDRFLKEGPFEDITIVQISVVDADEPPVFTLESYVMEI |
| | | | | AEGVVSGSLVGTVSARDLDNDDSSVRYSIVQGLHLKRLFSINE |
| | | | | HNGTIITTEPLDREKASWHNITVTATETRNPEKISEANVYIQV |
| | | | | LDVNDHAPEFSKYYETFVCENAVPGQLIQNISAVDKDDSAENH |
| | | | | RFYFSLAQATNSSHFTVKDNQDNTAGIFTAGSGFSRKEQFYFF |
| | | | | LPILILDNGSPPLTSTNTLTVTVCDCDTEVNTLYCRYGAFLYS |
| | | | | IGLSTEALVAVLACLLILLVFFLAIIGIRQQRKKTLFSEKVEE |
| | | | | FRENIVRYDDEGGGEEDTEAFDISALRTRAVLRTHKPRKKITT |
| | | | | EIHSLYRQSLQVGPDSAIFRQFISEKLEEANTDPSVPPYDSLQ |
| | | | | TYAFEGTGSLAGSLSSLGSNTSDVDQNYEYLVGWGPPFKQLAG |
| | | | | MYTSQRSTRD |
| 1453 | ckCDH19(1-43) | artificial | aa | MNCSTFLSLVLALVQLQLCSPTTQIFSAQKTDQSYTTIRRVKR |
| | ::FLAG::ckCDH19 | | | DYKDDDDKGWVWEPLFVTEEETSTMPMYVGQLKSDLDKEDGSL |
| | (44-141) | | | QYILTGEGADSIFFINEHGKIYVRQKLDREKKSFYILRAQVIN |
| | ::huCDH19 | | | RKTRHPIEPDSEFIIKVRDINDNEPKFLDEPYEAIVPEMSPEG |
| | (142-249) | | | TLVIQVTASDADDPSSGNNARLLYSLLQGQPYFSVEPTTGVIR |
| | ::ckCDH19 | | | ISSKMDRELQDEYWVIIQAKDMIGQPGALSGTTSVLIKLSDVN |
| | (250-776) | | | DNPPKFQQRLYYLNVSEEAPVGTTVGRLLAEDSDIGENAAMNY |
| | | | | FIEEDSSDVFGIITDRETQEGIIILKKRVDYESKRKHSVRVKA |
| | | | | VNRYIDDRFLKEGPFEDITIVQISVVDADEPPVFTLESYVMEI |
| | | | | AEGVVSGSLVGTVSARDLDNDDSSVRYSIVQGLHLKRLFSINE |
| | | | | HNGTIITTEPLDREKASWHNITVTATETRNPEKISEANVYIQV |
| | | | | LDVNDHAPEFSKYYETFVCENAVPGQLIQNISAVDKDDSAENH |
| | | | | RFYFSLAQATNSSHFTVKDNQDNTAGIFTAGSGFSRKEQFYFF |
| | | | | LPILILDNGSPPLTSTNTLTVTVCDCDTEVNTLYCRYGAFLYS |
| | | | | IGLSTEALVAVLACLLILLVFFLAIIGIRQQRKKTLFSEKVEE |
| | | | | FRENIVRYDDEGGGEEDTEAFDISALRTRAVLRTHKPRKKITT |
| | | | | EIHSLYRQSLQVGPDSAIFRQFISEKLEEANTDPSVPPYDSLQ |
| | | | | TYAFEGTGSLAGSLSSLGSNTSDVDQNYEYLVGWGPPFKQLAG |
| | | | | MYTSQRSTRD |
| 1454 | ckCDH19(1-43) | artificial | aa | MNCSTFLSLVLALVQLQLCSPTTQIFSAQKTDQSYTTIRRVKR |
| | ::FLAG::ckCDH19 | | | DYKDDDDKGWVWEPLFVTEEETSTMPMYVGQLKSDLDKEDGSL |
| | (44-249) | | | QYILTGEGADSIFFINEHGKIYVRQKLDREKKSFYILRAQVIN |
| | ::huCDH19 | | | RKTRHPIEPDSEFIIKVRDINDHEPQFLDGPYVATVPEMSPEG |
| | (250-364) | | | TSVTQVTATDGDDPSYGNNARLLYSLIQGQPYFSVEPKTGVIR |
| | ::ckCDH19 | | | MTSQMDRETKDQYLVVIQAKDMVGQAGAFSATATVTINLSDVN |
| | (365-776) | | | DNKPIFKESLYRLTVSESAPTGTSIGTIMAYDNDIGENAEMDY |
| | | | | SIEEDDSQTFDIITNHETQEGIVILKKKVDFEHQNHYGIRAKV |
| | | | | KNHHVPEQLMKYHTEASTTFIKIQVEDVDEPPVFTLESYVMEI |
| | | | | AEGVVSGSLVGTVSARDLDNDDSSVRYSIVQGLHLKRLFSINE |
| | | | | HNGTIITTEPLDREKASWHNITVTATETRNPEKISEANVYIQV |
| | | | | LDVNDHAPEFSKYYETFVCENAVPGQLIQNISAVDKDDSAENH |
| | | | | RFYFSLAQATNSSHFTVKDNQDNTAGIFTAGSGFSRKEQFYFF |
| | | | | LPILILDNGSPPLTSTNTLTVTVCDCDTEVNTLYCRYGAFLYS |
| | | | | IGLSTEALVAVLACLLILLVFFLAIIGIRQQRKKTLFSEKVEE |
| | | | | FRENIVRYDDEGGGEEDTEAFDISALRTRAVLRTHKPRKKITT |
| | | | | EIHSLYRQSLQVGPDSAIFRQFISEKLEEANTDPSVPPYDSLQ |
| | | | | TYAFEGTGSLAGSLSSLGSNTSDVDQNYEYLVGWGPPFKQLAG |
| | | | | MYTSQRSTRD |
| 1455 | ckCDH19(1-43) | artificial | aa | MNCSTFLSLVLALVQLQLCSPTTQIFSAQKTDQSYTTIRRVKR |
| | ::FLAG::ckCDH19 | | | DYKDDDDKGWVWEPLFVTEEETSTMPMYVGQLKSDLDKEDGSL |
| | (44-364) | | | QYILTGEGADSIFFINEHGKIYVRQKLDREKKSFYILRAQVIN |
| | ::huCDH19 | | | RKTRHPIEPDSEFIIKVRDINDHEPQFLDGPYVATVPEMSPEG |
| | (365-463) | | | TSVTQVTATDGDDPSYGNNARLLYSLIQGQPYFSVEPKTGVIR |
| | ::ckCDH19 | | | MTSQMDRETKDQYLVVIQAKDMVGQAGAFSATATVTINLSDVN |
| | (469-776) | | | DNPPKFQQRLYYLNVSEEAPVGTTVGRLLAEDSDIGENAAMNY |
| | | | | FIEEDSSDVFGIITDRETQEGIIILKKRVDYESKRKHSVRVKA |
| | | | | VNRYIDDRFLKEGPFEDITIVQISVVDADEPPLFLLPYYVFEV |
| | | | | FEETPQGSFVGVVSATDPDNRKSPIRYSITRSKVFNINDNGTI |
| | | | | TTSNSLDREISAWYNLSITATEKYNIEQISSIPLYVQVLNIND |
| | | | | HAPEFSKYYETFVCENAVPGQLIQNISAVDKDDSAENHRFYFS |
| | | | | LAQATNSSHFTVKDNQDNTAGIFTAGSGFSRKEQFYFFLPILI |
| | | | | LDNGSPPLTSTNTLTVTVCDCDTEVNTLYCRYGAFLYSIGLST |
| | | | | EALVAVLACLLILLVFFLAIIGIRQQRKKTLFSEKVEEFRENI |
| | | | | VRYDDEGGGEEDTEAFDISALRTRAVLRTHKPRKKITTEIHSL |
| | | | | YRQSLQVGPDSAIFRQFISEKLEEANTDPSVPPYDSLQTYAFE |
| | | | | GTGSLAGSLSSLGSNTSDVDQNYEYLVGWGPPFKQLAGMYTSQ |
| | | | | RSTRD |
| 1456 | (1-43) | artificial | aa | MNCSTFLSLVLALVQLQLCSPTTQIFSAQKTDQSYTTIRRVKR |
| | ::FLAG::ckCDH19 | | | DYKDDDDKGWVWEPLFVTEEETSTMPMYVGQLKSDLDKEDGSL |
| | (44-468) | | | QYILTGEGADSIFFINEHGKIYVRQKLDREKKSFYILRAQVIN |
| | ::huCDH19 | | | RKTRHPIEPDSEFIIKVRDINDHEPQFLDGPYVATVPEMSPEG |
| | (464-772) | | | TSVTQVTATDGDDPSYGNNARLLYSLIQGQPYFSVEPKTGVIR |
| | | | | MTSQMDRETKDQYLVVIQAKDMVGQAGAFSATATVTINLSDVN |
| | | | | DNPPKFQQRLYYLNVSEEAPVGTTVGRLLAEDSDIGENAAMNY |
| | | | | FIEEDSSDVFGIITDRETQEGIIILKKRVDYESKRKHSVRVKA |
| | | | | VNRYIDDRFLKEGPFEDITIVQISVVDADEPPVFTLESYVMEI |
| | | | | AEGVVSGSLVGTVSARDLDNDDSSVRYSIVQGLHLKRLFSINE |
| | | | | HNGTIITTEPLDREKASWHNITVTATETRNPEKISEANVYIQV |
| | | | | LDVNDHAPEFSQYYETYVCENAGSGQVIQTISAVDRDESIEEH |
| | | | | HFYFNLSVEDTNNSSFTIIDNQDNTAVILTNRTGFNLQEEPVF |
| | | | | YISILIADNGIPSLTSTNTLTIHVCDCGDSGSTQTCQYQELVL |
| | | | | SMGFKTEVIIAILICIMIIFGFIFLTLGLKQRRKQILFPEKSE |
| | | | | DFRENIFQYDDEGGGEEDTEAFDIAELRSSTIMRERKTRKTTS |
| | | | | AEIRSLYRQSLQVGPDSAIFRKFILEKLEEANTDPCAPPFDSL |
| | | | | QTYAFEGTGSLAGSLSSLESAVSDQDESYDYLNELGPRFKRLA |
| | | | | CMFGSAVQSNN |
| 1457 | rhCDH19(1-43) | artificial | aa | MNCYLLLPFMLGIPLLWPCLGATENSQTKKVQQPVGSHLRVKR |
| | ::FLAG::rhCDH19 | | | DYKDDDDKGWVWNQFFVPEEMNTTSHHVGRLRSDLDNGNNSFQ |
| | (44-772) | | | YKLLGAGAGSTFIIDERTGDIYAIEKLDREERSLYILRAQVID |
| | | | | ITTGRAVEPESEFVIKVSDINDNEPKFLDEPYEAIVPEMSPEG |
| | | | | TLVIQVTASDADDPSSGNNARLLYSLLQGQPYFSVEPTTGVIR |
| | | | | ISSKMDRELQDEYWVIIQAKDMIGQPGALSGTTSVLIKLSDVN |
| | | | | DNKPIFKESLYRLTVSESAPTGTSIGTIMAYDNDIGENAEMDY |
| | | | | SIEEDDSQTFDIITNHETQEGIVILKKKVNFEHQNHYGIRAKV |
| | | | | KNHHVDEQLMKYHTEASTTFIKIQVEDVDEPPLFLLPYYIFEI |
| | | | | FEETPQGSFVGVVSATDPDNRKSPIRYSITRSKVFNIDDNGTI |
| | | | | TTTNSLDREISAWYNLSITATEKYNIEQISSIPVYVQVLNIND |
| | | | | HAPEFSQYYESYVCENAGSGQVIQTISAVDRDESIEEHHFYFN |
| | | | | LSVEDTNSSSFTIIDNQDNTAVILTNRTGFNLQEEPIFYISIL |
| | | | | IADNGIPSLTSTNTLTIHVCDCDDSGSTQTCQYQELMLSMGFK |
| | | | | TEVIIAILICIMVIFGFIFLTLGLKQRRKQILFPEKSEDFREN |
| | | | | IFRYDDEGGGEEDTEAFDVAALRSSTIMRERKTRKTTSAEIRS |
| | | | | LYRQSLQVGPDSAIFRKFILEKLEEADTDPCAPPFDSLQTYAF |
| | | | | EGTGSLAGSLSSLESAVSDQDESYDYLNELGPRFKRLACMFGS |
| | | | | AVQSNN |
| 1458 | caCDH19(1-42) | artificial | aa | QFFVPEEMNKTDYHIGQLRSDLDNGNNSFQYKLLGAGAGSIFV |
| | ::FLAG::caCDH19 | | | IDERTGDIYAIQKLDREERSLYTLRAQVIDSTTGRAVEPESEF |
| | (43-770) | | | VIRVSDINDNEPKFLDEPYEAIVPEMSPEGTLVIQVTATDADD |
| | | | | PASGNNARLLYSLLQGQPYFSIEPTTGVIRISSKMDRELQDEY |
| | | | | WVIIQAKDMIGLPGALSGTTSVLIKLSDVNDNKPIFKERLYRL |
| | | | | TVSESAPTGTSIGRIMAYDNDIGENAEMDYSIEDDSQTFDIIT |
| | | | | NNETQEGIVILKKKVDFEHQNHYLIRANVKNRHVAEHLMEYHV |
| | | | | EASTTFVRVQVEDEDEPPVFLLPYYLFEILEESPHGSFVGMVS |
| | | | | ATDPDQRKSPIRYSITRSKVFSIDDNGTIITTNPLDREISAWY |
| | | | | NLSITATEKYNVQQISAVPVYVQVLNINDHAPEFSEYYDSYVC |
| | | | | ENAGSGQVIQTISAVDRDESVEDHHFYFNLSVEDTKNSSFIII |
| | | | | DNEDNTAVILTNRTGFSLQEEPVFYISVLIADNGIPSLTSTNT |
| | | | | LTIHICDCDDYGSTQTCRDKDLLLSMGFRTEVILAILISIMII |
| | | | | FGFIFLILGLKQRRKPTLFPEKGEDFRENIFRYDDEGGGEEDT |
| | | | | EAFDIVQLRSSTIMRERKTRKTAAAEIRSLYRQSLQVGPDSAI |
| | | | | FRKFILEKLEEANTDPCAPPFDSLQTYAFEGTGSLAGSLSSLG |
| | | | | SAVSDQDENYDYLNELGPRFKRLACMFGSAMQSNN |
| 1459 | rhCDH19(1-43): | artificial | aa | MNCYLLLPFMLGIPLLWPCLGATENSQTKKVQQPVGSHLRVKR |
| | FLAG::rhCDH19 | | | DYKDDDDKGWVWNQFFVPEEMNTTSHHVGRLRSDLDNGNNSFQ |
| | (44-141) | | | YKLLGAGAGSTFIIDERTGDIYAIEKLDREERSLYILRAQVID |
| | ::caCDH19 | | | ITTGRAVEPESEFVIKVSDINDNEPKFLDEPYEAIVPEMSPEG |
| | (141-770) | | | TLVIQVTATDADDPASGNNARLLYSLLQGQPYFSIEPTTGVIR |
| | | | | ISSKMDRELQDEYWVIIQAKDMIGLPGALSGTTSVLIKLSDVN |
| | | | | DNKPIFKERLYRLTVSESAPTGTSIGRIMAYDNDIGENAEMDY |
| | | | | SIEDDSQTFDIITNNETQEGIVILKKKVDFEHQNHYLIRANVK |
| | | | | NRHVAEHLMEYHVEASTTFVRVQVEDEDEPPVFLLPYYLFEIL |
| | | | | EESPHGSFVGMVSATDPDQRKSPIRYSITRSKVFSIDDNGTII |
| | | | | TTNPLDREISAWYNLSITATEKYNVQQISAVPVYVQVLNINDH |
| | | | | APEFSEYYDSYVCENAGSGQVIQTISAVDRDESVEDHHFYFNL |
| | | | | SVEDTKNSSFIIIDNEDNTAVILTNRTGFSLQEEPVFYISVLI |
| | | | | ADNGIPSLTSTNTLTIHICDCDDYGSTQTCRDKDLLLSMGFRT |
| | | | | EVILAILISIMIIFGFIFLILGLKQRRKPTLFPEKGEDFRENI |
| | | | | FRYDDEGGGEEDTEAFDIVQLRSSTIMRERKTRKTAAAEIRSL |
| | | | | YRQSLQVGPDSAIFRKFILEKLEEANTDPCAPPFDSLQTYAFE |
| | | | | GTGSLAGSLSSLGSAVSDQDENYDYLNELGPRFKRLACMFGSA |
| | | | | MQSNN |
| 1460 | rhCDH19(1-43) | artificial | aa | MNCYLLLPFMLGIPLLWPCLGATENSQTKKVQQPVGSHLRVKR |
| | ::FLAG::rhCDH19 | | | DYKDDDDKGWVWNQFFVPEEMNTTSHHVGRLRSDLDNGNNSFQ |
| | (44-65) | | | YKLLGAGAGSIFVIDERTGDIYAIQKLDREERSLYTLRAQVID |
| | ::caCDH19 | | | STTGRAVEPESEFVIRVSDINDNEPKFLDEPYEAIVPEMSPEG |
| | (65-770) | | | TLVIQVTATDADDPASGNNARLLYSLLQGQPYFSIEPTTGVIR |
| | | | | ISSKMDRELQDEYWVIIQAKDMIGLPGALSGTTSVLIKLSDVN |
| | | | | DNKPIFKERLYRLTVSESAPTGTSIGRIMAYDNDIGENAEMDY |
| | | | | SIEDDSQTFDIITNNETQEGIVILKKKVDFEHQNHYLIRANVK |
| | | | | NRHVAEHLMEYHVEASTTFVRVQVEDEDEPPVFLLPYYLFEIL |
| | | | | EESPHGSFVGMVSATDPDQRKSPIRYSITRSKVFSIDDNGTII |
| | | | | TTNPLDREISAWYNLSITATEKYNVQQISAVPVYVQVLNINDH |
| | | | | APEFSEYYDSYVCENAGSGQVIQTISAVDRDESVEDHHFYFNL |
| | | | | SVEDTKNSSFIIIDNEDNTAVILTNRTGFSLQEEPVFYISVLI |
| | | | | ADNGIPSLTSTNTLTIHICDCDDYGSTQTCRDKDLLLSMGFRT |
| | | | | EVILAILISIMIIFGFIFLILGLKQRRKPTLFPEKGEDFRENI |
| | | | | FRYDDEGGGEEDTEAFDIVQLRSSTIMRERKTRKTAAAEIRSL |
| | | | | YRQSLQVGPDSAIFRKFILEKLEEANTDPCAPPFDSLQTYAFE |
| | | | | GTGSLAGSLSSLGSAVSDQDENYDYLNELGPRFKRLACMFGSA |
| | | | | MQSNN |
| 1461 | caCDH19(1-43) | artificial | aa | MNYCFLLPLMLGIPLIWPCFTASESSKTEVKHQAGSHLRVKRD |
| | ::FLAG::caCDH19 | | | YKDDDDKGWMWNQFFVPEEMNKTDYHIGQLRSDLDNGNNSFQY |
| | (44-87) | | | KLLGAGAGSTFIIDERTGDIYAIEKLDREERSLYILRAQVIDS |
| | ::rhCDH19 | | | TTGRAVEPESEFVIRVSDINDNEPKFLDEPYEAIVPEMSPEGT |
| | (89-114) | | | LVIQVTATDADDPASGNNARLLYSLLQGQPYFSIEPTTGVIRI |
| | ::caCDH19 | | | SSKMDRELQDEYWVIIQAKDMIGLPGALSGTTSVLIKLSDVND |
| | (115-770) | | | NKPIFKERLYRLTVSESAPTGTSIGRIMAYDNDIGENAEMDYS |
| | | | | IEDDSQTFDIITNNETQEGIVILKKKVDFEHQNHYLIRANVKN |
| | | | | RHVAEHLMEYHVEASTTFVRVQVEDEDEPPVFLLPYYLFEILE |
| | | | | ESPHGSFVGMVSATDPDQRKSPIRYSITRSKVFSIDDNGTIIT |
| | | | | TNPLDREISAWYNLSITATEKYNVQQISAVPVYVQVLNINDHA |
| | | | | PEFSEYYDSYVCENAGSGQVIQTISAVDRDESVEDHHFYFNLS |
| | | | | VEDTKNSSFIIIDNEDNTAVILTNRTGFSLQEEPVFYISVLIA |
| | | | | DNGIPSLTSTNTLTIHICDCDDYGSTQTCRDKDLLLSMGFRTE |
| | | | | VILAILISIMIIFGFIFLILGLKQRRKPTLFPEKGEDFRENIF |
| | | | | RYDDEGGGEEDTEAFDIVQLRSSTIMRERKTRKTAAAEIRSLY |
| | | | | RQSLQVGPDSAIFRKFILEKLEEANTDPCAPPFDSLQTYAFEG |
| | | | | TGSLAGSLSSLGSAVSDQDENYDYLNELGPRFKRLACMFGSAM |
| | | | | QSNN |
| 1462 | caCDH19(1-43) | artificial | aa | MNYCFLLPLMLGIPLIWPCFTASESSKTEVKHQAGSHLRVKRD |
| | ::FLAG::caCDH19 | | | YKDDDDKGWMWNQFFVPEEMNKTDYHIGQLRSDLDNGNNSFQY |
| | (44-120) | | | KLLGAGAGSIFVIDERTGDIYAIQKLDREERSLYTLRAQVIDI |
| | ::rhCDH19 | | | TTGRAVEPESEFVIKVSDINDNEPKFLDEPYEAIVPEMSPEGT |
| | (122-137) | | | LVIQVTATDADDPASGNNARLLYSLLQGQPYFSIEPTTGVIRI |
| | ::caCDH19 | | | SSKMDRELQDEYWVIIQAKDMIGLPGALSGTTSVLIKLSDVND |
| | (137-770) | | | NKPIFKERLYRLTVSESAPTGTSIGRIMAYDNDIGENAEMDYS |
| | | | | IEDDSQTFDIITNNETQEGIVILKKKVDFEHQNHYLIRANVKN |
| | | | | RHVAEHLMEYHVEASTTFVRVQVEDEDEPPVFLLPYYLFEILE |
| | | | | ESPHGSFVGMVSATDPDQRKSPIRYSITRSKVFSIDDNGTIIT |
| | | | | TNPLDREISAWYNLSITATEKYNVQQISAVPVYVQVLNINDHA |
| | | | | PEFSEYYDSYVCENAGSGQVIQTISAVDRDESVEDHHFYFNLS |
| | | | | VEDTKNSSFIIIDNEDNTAVILTNRTGFSLQEEPVFYISVLIA |
| | | | | DNGIPSLTSTNTLTIHICDCDDYGSTQTCRDKDLLLSMGFRTE |
| | | | | VILAILISIMIIFGFIFLILGLKQRRKPTLFPEKGEDFRENIF |
| | | | | RYDDEGGGEEDTEAFDIVQLRSSTIMRERKTRKTAAAEIRSLY |
| | | | | RQSLQVGPDSAIFRKFILEKLEEANTDPCAPPFDSLQTYAFEG |
| | | | | TGSLAGSLSSLGSAVSDQDENYDYLNELGPRFKRLACMFGSAM |
| | | | | QSNN |
| 1463 | rhCDH19(1-43) | artificial | aa | MNCYLLLPFMLGIPLLWPCLGATENSQTKKVQQPVGSHLRVKR |
| | ::FLAG::rhCDH19 | | | DYKDDDDKGWVWNQFFVPEEMNTTSHHVGRLRSDLDNGNNSFQ |
| | (44-141) | | | YKLLGAGAGSTFIIDERTGDIYAIEKLDREERSLYILRAQVID |
| | ::raCDH19 | | | ITTGRAVEPESEFVIKVSDINDNEPRFLDEPYEAIVPEMSPEG |
| | (140-247) | | | TFVIKVTANDADDPTSGYHARILYNLEQGQPYFSVEPTTGVIR |
| | ::rhCDH19 | | | ISSKMDRELQDTYCVIIQAKDMLGQPGALSGTTTISIKLSDIN |
| | (250-772) | | | DNKPIFKESLYRLTVSESAPTGTSIGTIMAYDNDIGENAEMDY |
| | | | | SIEEDDSQTFDIITNHETQEGIVILKKKVNFEHQNHYGIRAKV |
| | | | | KNHHVDEQLMKYHTEASTTFIKIQVEDVDEPPLFLLPYYIFEI |
| | | | | FEETPQGSFVGVVSATDPDNRKSPIRYSITRSKVFNIDDNGTI |
| | | | | TTTNSLDREISAWYNLSITATEKYNIEQISSIPVYVQVLNIND |
| | | | | HAPEFSQYYESYVCENAGSGQVIQTISAVDRDESIEEHHFYFN |
| | | | | LSVEDTNSSSFTIIDNQDNTAVILTNRTGFNLQEEPIFYISIL |
| | | | | IADNGIPSLTSTNTLTIHVCDCDDSGSTQTCQYQELMLSMGFK |
| | | | | TEVIIAILICIMVIFGFIFLTLGLKQRRKQILFPEKSEDFREN |
| | | | | IFRYDDEGGGEEDTEAFDVAALRSSTIMRERKTRKTTSAEIRS |
| | | | | LYRQSLQVGPDSAIFRKFILEKLEEADTDPCAPPFDSLQTYAF |
| | | | | EGTGSLAGSLSSLESAVSDQDESYDYLNELGPRFKRLACMFGS |
| | | | | AVQSNN |
| 1464 | raCDH19(1-43) | artificial | aa | MNHYFLKYWILMVPLIWPCLKVAETLKIEKAQRAVPSLGRAKR |
| | ::FLAG::raCDH19 | | | DYKDDDDKGWVWKQFVVPEEMDTIQHVGRLRSDLDNGNNSFQY |
| | (44-770) | | | KLLGTGDGSFSIDEKTGDIFAMQKLDREKQSLYILRAQVIDTT |
| | | | | IGKAVEPESEFVIRVSDVNDNEPRFLDEPYEAIVPEMSPEGTF |
| | | | | VIKVTANDADDPTSGYHARILYNLEQGQPYFSVEPTTGVIRIS |
| | | | | SKMDRELQDTYCVIIQAKDMLGQPGALSGTTTISIKLSDINDN |
| | | | | KPIFKESFYRFTISESAPSGTTIGKIMAYDDDIGENAEMDYSI |
| | | | | EDDESQIFDIVIDNETQEGIVILKKKVDFEHQNHYGIRVKVKN |
| | | | | CHVDEELAPAHVNASTTYIKVQVEDEDEPPTFLLPYYIFEIPE |
| | | | | GKPYGTMVGTVSAVDPDRRQSPMRYSLIGSKMFDINGNGTIVT |
| | | | | TNLLDREVSAWYNLSVTATETYNVQQISSAHVYVQVLNINDHA |
| | | | | PEFSQLYETYVCENAESGEIIQTISAIDRDESIEDHHFYFNHS |
| | | | | VEDTNNSSFILTDNQDNTAVILSNRAGFSLKEETVFYMIILIA |
| | | | | DNGIPPLTSTNTLTIQVCDCGDSRSTETCTSKELLFIMGFKAE |
| | | | | AIIAIVICVMVIFGFIFLILALKQRRKETLFPEKTEDFRENIF |
| | | | | CYDDEGGGEEDSEAFDIIELRQSTVMRERKPRKSRSAEIRSLY |
| | | | | RQSLQVGPDSAIFRKFILEKLEEANTDSSAPPFDSLQTFAYEG |
| | | | | TGSSAGSLSSLGSSVTDQEDDFDYLNDLGPCFKRLANMFGSAV |
| | | | | QPDN |
| 1465 | (1-43) | artificial | aa | MNYCFLKHWILMIPLLWPCLKVSETLKAEKARRTVPSTWRAKR |
| | ::FLAG::muCDH19 | | | DYKDDDDKAWVWRPFVVLEEMDDIQCVGKLRSDLDNGNNSFQY |
| | (44-323) | | | KLLGIGAGSFSINERTGEICAIQKLDREEKSLYILRAQVIDTT |
| | ::raCDH19 | | | IGKAVETESEFVIRVLDINDNEPRFLDEPYEAIVPEMSPEGTF |
| | (324-327) | | | VIKVTANDADDPSTGYHARILYNLERGQPYFSVEPTTGVIRIS |
| | ::muCDH19 | | | SKMDRELQDTYCVIIQAKDMLGQPGALSGTTTVSIKLSDINDN |
| | (328-770) | | | KPIFKESFYRFTISESAPIGTSIGKIMAYDDDIGENAEMEYSI |
| | | | | EDDDSKIFDIIIDNDTQEGIVILKKKVDFEHQNHYGIRAKVKN |
| | | | | CHVDEELAPAHVNASTTYIKVQVEDEDEPPVFLLPYYILEIPE |
| | | | | GKPYGTIVGTVSATDPDRRQSPMRYYLTGSKMFDINDNGTIIT |
| | | | | TNMLDREVSAWYNLTVTATETYNVQQISSAHVYVQVFNINDNA |
| | | | | PEFSQFYETYVCENAESGEIVQIISAIDRDESIEDHHFYFNHS |
| | | | | LEDTNNSSFMLTDNQDNTAVILSNRTGFNLKEEPVFYMIILIA |
| | | | | DNGIPSLTSTNTLTIQVCDCGDSRNTETCANKGLLFIMGFRTE |
| | | | | AIIAIMICVMVIFGFFFLILALKQRRKETLFPEKTEDFRENIF |
| | | | | CYDDEGGGEEDSEAFDIVELRQSTVMRERKPQRSKSAEIRSLY |
| | | | | RQSLQVGPDSAIFRKFILEKLEEANTDPCAPPFDSLQTFAYEG |
| | | | | TGSSAGSLSSLASRDTDQEDDFDYLNDLGPRFKRLASMFGSAV |
| | | | | QPNN |
| 1466 | muCDH19(1-43) | artificial | aa | MNYCFLKHWILMIPLLWPCLKVSETLKAEKARRTVPSTWRAKR |
| | ::FLAG::muCDH19 | | | DYKDDDDKAWVWRPFVVLEEMDDIQCVGKLRSDLDNGNNSFQY |
| | (44-770) | | | KLLGIGAGSFSINERTGEICAIQKLDREEKSLYILRAQVIDTT |
| | ::raCDH19 | | | IGKAVETESEFVIRVLDINDNEPRFLDEPYEAIVPEMSPEGTF |
| | (290, 299, 308) | | | VIKVTANDADDPSTGYHARILYNLERGQPYFSVEPTTGVIRIS |
| | | | | SKMDRELQDTYCVIIQAKDMLGQPGALSGTTTVSIKLSDINDN |
| | | | | KPIFKESFYRFTISESAPIGTSIGKIMAYDDDIGENAEMEYSI |
| | | | | EDDDSKIFDIIIDNDTQEGIVILKKKVDFEQQSYYGIRAKVKN |
| | | | | CHVDEELAPAHVNASTTYIKVQVEDEDEPPVFLLPYYILEIPE |
| | | | | GKPYGTIVGTVSATDPDRRQSPMRYYLTGSKMFDINDNGTIIT |
| | | | | TNMLDREVSAWYNLTVTATETYNVQQISSAHVYVQVFNINDNA |
| | | | | PEFSQFYETYVCENAESGEIVQIISAIDRDESIEDHHFYFNHS |
| | | | | LEDTNNSSFMLTDNQDNTAVILSNRTGFNLKEEPVFYMIILIA |
| | | | | DNGIPSLTSTNTLTIQVCDCGDSRNTETCANKGLLFIMGFRTE |
| | | | | AIIAIMICVMVIFGFFFLILALKQRRKETLFPEKTEDFRENIF |
| | | | | CYDDEGGGEEDSEAFDIVELRQSTVMRERKPQRSKSAEIRSLY |
| | | | | RQSLQVGPDSAIFRKFILEKLEEANTDPCAPPFDSLQTFAYEG |
| | | | | TGSSAGSLSSLASRDTDQEDDFDYLNDLGPRFKRLASMFGSAV |
| | | | | QPNN |
| 1467 | muCDH19(1-43) | artificial | aa | MNYCFLKHWILMIPLLWPCLKVSETLKAEKARRTVPSTWRAKR |
| | ::FLAG::muCDH19 | | | DYKDDDDKAWVWRPFVVLEEMDDIQCVGKLRSDLDNGNNSFQY |
| | (44-770) | | | KLLGIGAGSFSINERTGEICAIQKLDREEKSLYILRAQVIDTT |
| | ::huCDH19 | | | IGKAVETESEFVIRVLDINDNEPRFLDEPYEAIVPEMSPEGTF |
| | (271) | | | VIKVTANDADDPSTGYHARILYNLERGQPYFSVEPTTGVIRIS |
| | | | | SKMDRELQDTYCVIIQAKDMLGQPGALSGTTTVSIKLSDINDN |
| | | | | KPIFKESFYRFTISESAPTGTSIGKIMAYDDDIGENAEMEYSI |
| | | | | EDDDSKIFDIIIDNDTQEGIVILKKKVDFEQQSYYGIRAKVKN |
| | | | | CHVDEELAPAHVNASTTYIKVQVEDEDEPPVFLLPYYILEIPE |
| | | | | GKPYGTIVGTVSATDPDRRQSPMRYYLTGSKMFDINDNGTIIT |
| | | | | TNMLDREVSAWYNLTVTATETYNVQQISSAHVYVQVFNINDNA |
| | | | | PEFSQFYETYVCENAESGEIVQIISAIDRDESIEDHHFYFNHS |
| | | | | LEDTNNSSFMLTDNQDNTAVILSNRTGFNLKEEPVFYMIILIA |
| | | | | DNGIPSLTSTNTLTIQVCDCGDSRNTETCANKGLLFIMGFRTE |
| | | | | AIIAIMICVMVIFGFFFLILALKQRRKETLFPEKTEDFRENIF |
| | | | | CYDDEGGGEEDSEAFDIVELRQSTVMRERKPQRSKSAEIRSLY |
| | | | | RQSLQVGPDSAIFRKFILEKLEEANTDPCAPPFDSLQTFAYEG |
| | | | | TGSSAGSLSSLASRDTDQEDDFDYLNDLGPRFKRLASMFGSAV |
| | | | | QPNN |

The application's sequence listing, which the Patent Office published only in electronic form, follows.

SEQUENCE LISTING (1467 sequences)

SEQ ID NO: 1 - DNA, 15 bp, artificial
  1D10, 2C12 - CDR-H1
agctatggcatgcac

SEQ ID NO: 2 - DNA, 51 bp, artificial
  1D10, 2C12 - CDR-H2
gttatatggtatgatggaagtaataaatactatgcagactccgtgaagggc

SEQ ID NO: 3 - DNA, 48 bp, artificial
  1D10, 2C12 - CDR-H3
agggccggtataataggaactacaggctactactacggtatggacgtc

SEQ ID NO: 4 - protein, 5 aa, artificial
  1D10, 2C12 - CDR-H1
SYGMH

SEQ ID NO: 5 - protein, 17 aa, artificial
  1D10, 2C12 - CDR-H2
VIWYDGSNKYYADSVKG

SEQ ID NO: 6 - protein, 16 aa, artificial
  1D10, 2C12 - CDR-H3
RAGIIGTTGYYYGMDV

SEQ ID NO: 7 - DNA, 21 bp, artificial
  1F10 - CDR-H1
agtggtggttactactggagc

SEQ ID NO: 8 - DNA, 48 bp, artificial
  1F10 - CDR-H2
tacatctattacagtgggagcacctactacaacccgtccctcacgagt

SEQ ID NO: 9 - DNA, 30 bp, artificial
  1F10 - CDR-H3
gatggaagcagtggctggtacttccagcac

SEQ ID NO: 10 - protein, 7 aa, artificial
  1F10 - CDR-H1
SGGYYWS

SEQ ID NO: 11 - protein, 16 aa, artificial
  1F10 - CDR-H2
YIYYSGSTYYNPSLTS

SEQ ID NO: 12 - protein, 10 aa, artificial
  1F10 - CDR-H3
DGSSGWYFQH

SEQ ID NO: 13 - DNA, 15 bp, artificial
  2C12_LC#1 - CDR-H1
agctatggcatgcac

SEQ ID NO: 14 - DNA, 51 bp, artificial; identical to SEQ ID NO: 2
  2C12_LC#1 - CDR-H2

SEQ ID NO: 15 - DNA, 48 bp, artificial; identical to SEQ ID NO: 3
  2C12_LC#1 - CDR-H3

SEQ ID NO: 16 - protein, 5 aa, artificial
  2C12_LC#1 - CDR-H1
SYGMH

SEQ ID NO: 17 - protein, 17 aa, artificial
  2C12_LC#1 - CDR-H2
VIWYDGSNKYYADSVKG

SEQ ID NO: 18 - protein, 16 aa, artificial
  2C12_LC#1 - CDR-H3
RAGIIGTTGYYYGMDV

SEQ ID NO: 19 - DNA, 15 bp, artificial
  2G6_LC#1 - CDR-H1
agctatggcatgcac

SEQ ID NO: 20 - DNA, 51 bp, artificial
  2G6_LC#1 - CDR-H2
tttatatggtatgatggaagtaataaatactatgcagactccgtgaaggac

SEQ ID NO: 21 - DNA, 48 bp, artificial
  2G6_LC#1 - CDR-H3
agggccggtataataggaactataggctactactacggtatggacgtc

SEQ ID NO: 22 - protein, 5 aa, artificial
  2G6_LC#1 - CDR-H1
SYGMH

SEQ ID NO: 23 - protein, 17 aa, artificial
  2G6_LC#1 - CDR-H2
FIWYDGSNKYYADSVKD

SEQ ID NO: 24 - protein, 16 aa, artificial
  2G6_LC#1 - CDR-H3
RAGIIGTIGYYYGMDV

SEQ ID NO: 25 - DNA, 15 bp, artificial
  2G6 - CDR-H1
agctatggcatgcac

SEQ ID NO: 26 - DNA, 51 bp, artificial; identical to SEQ ID NO: 20
  2G6 - CDR-H2

SEQ ID NO: 27 - DNA, 48 bp, artificial; identical to SEQ ID NO: 21
  2G6 - CDR-H3

SEQ ID NO: 28 - protein, 5 aa, artificial
  2G6 - CDR-H1
SYGMH

SEQ ID NO: 29 - protein, 17 aa, artificial
  2G6 - CDR-H2
FIWYDGSNKYYADSVKD

SEQ ID NO: 30 - protein, 16 aa, artificial
  2G6 - CDR-H3
RAGIIGTIGYYYGMDV

SEQ ID NO: 31 - DNA, 15 bp, artificial
  2H12 - CDR-H1
agctatggcatgcac

SEQ ID NO: 32 - DNA, 51 bp, artificial
  2H12 - CDR-H2
gttatatggtatgatggaagtaataaatactatacagactccgtgaagggc

SEQ ID NO: 33 - DNA, 48 bp, artificial; identical to SEQ ID NO: 3
  2H12 - CDR-H3

SEQ ID NO: 34 - protein, 5 aa, artificial
  2H12 - CDR-H1
SYGMH

SEQ ID NO: 35 - protein, 17 aa, artificial
  2H12 - CDR-H2
VIWYDGSNKYYTDSVKG

SEQ ID NO: 36 - protein, 16 aa, artificial
  2H12 - CDR-H3
RAGIIGTTGYYYGMDV

SEQ ID NO: 37 - DNA, 15 bp, artificial
  2H12_LC#2 - CDR-H1
agctatggcatgcac

SEQ ID NO: 38 - DNA, 51 bp, artificial; identical to SEQ ID NO: 32
  2H12_LC#2 - CDR-H2

SEQ ID NO: 39 - DNA, 48 bp, artificial; identical to SEQ ID NO: 3
  2H12_LC#2 - CDR-H3

SEQ ID NO: 40 - protein, 5 aa, artificial
  2H12_LC#2 - CDR-H1
SYGMH

SEQ ID NO: 41 - protein, 17 aa, artificial
  2H12_LC#2 - CDR-H2
VIWYDGSNKYYTDSVKG

SEQ ID NO: 42 - protein, 16 aa, artificial
  2H12_LC#2 - CDR-H3
RAGIIGTTGYYYGMDV

SEQ ID NO: 43 - DNA, 21 bp, artificial
  4A2, 5B4, 5C5   - CDR-H1
agtagtggttactactggagc

SEQ ID NO: 44 - DNA, 48 bp, artificial
  4A2, 5B4, 5C5  - CDR-H2
tacatctattacactgggagcgcctactacaacccgtccctcaagagt

SEQ ID NO: 45 - DNA, 30 bp, artificial
  4A2, 5B4, 5C5  - CDR-H3
gatggaagcagtggctggtacttccagtat

SEQ ID NO: 46 - protein, 7 aa, artificial
  4A2, 5B4, 5C5  - CDR-H1
SSGYYWS

SEQ ID NO: 47 - protein, 16 aa, artificial
  4A2, 5B4, 5C5  - CDR-H2
YIYYTGSAYYNPSLKS

SEQ ID NO: 48 - protein, 10 aa, artificial
  4A2, 5B4, 5C5  - CDR-H3
DGSSGWYFQY

SEQ ID NO: 49 - DNA, 15 bp, artificial
  4A9 - CDR-H1
ggttactactggagc

SEQ ID NO: 50 - DNA, 48 bp, artificial
  4A9 - CDR-H2
tatttctcttacagtgggagcaccaactacaacccctccctcaagagt

SEQ ID NO: 51 - DNA, 24 bp, artificial
  4A9 - CDR-H3
aactgggccttccactttgacttc

SEQ ID NO: 52 - protein, 5 aa, artificial
  4A9 - CDR-H1
GYYWS

SEQ ID NO: 53 - protein, 16 aa, artificial
  4A9 - CDR-H2
YFSYSGSTNYNPSLKS

SEQ ID NO: 54 - protein, 8 aa, artificial
  4A9 - CDR-H3
NWAFHFDF

SEQ ID NO: 55 - DNA, 15 bp, artificial
  4B10, 4C2 - CDR-H1
agctatgacatgcac

SEQ ID NO: 56 - DNA, 51 bp, artificial
  4B10, 4C2  - CDR-H2
gttatatcatatgatggaactaatgaatactatgcagactccgtgaagggc

SEQ ID NO: 57 - DNA, 30 bp, artificial
  4B10, 4C2 - CDR-H3
gaacgatattttgactggtcttttgactac

SEQ ID NO: 58 - protein, 5 aa, artificial
  4B10, 4C2 - CDR-H1
SYDMH

SEQ ID NO: 59 - protein, 17 aa, artificial
  4B10, 4C2 - CDR-H2
VISYDGTNEYYADSVKG

SEQ ID NO: 60 - protein, 10 aa, artificial
  4B10, 4C2 - CDR-H3
ERYFDWSFDY

SEQ ID NO: 61 - DNA, 15 bp, artificial
  4D2 - CDR-H1
agttatgacatgcac

SEQ ID NO: 62 - DNA, 51 bp, artificial; identical to SEQ ID NO: 56
  4D2 - CDR-H2

SEQ ID NO: 63 - DNA, 30 bp, artificial; identical to SEQ ID NO: 57
  4D2 - CDR-H3

SEQ ID NO: 64 - protein, 5 aa, artificial
  4D2 - CDR-H1
SYDMH

SEQ ID NO: 65 - protein, 17 aa, artificial
  4D2 - CDR-H2
VISYDGTNEYYADSVKG

SEQ ID NO: 66 - protein, 10 aa, artificial
  4D2 - CDR-H3
ERYFDWSFDY

SEQ ID NO: 67 - DNA, 15 bp, artificial
  4D3, 4F3 - CDR-H1
agctatgacatggac

SEQ ID NO: 68 - DNA, 51 bp, artificial
  4D3, 4F3 - CDR-H2
gttatatggtatgatggaagtaataaatactatgcagactccgtgaggggc

SEQ ID NO: 69 - DNA, 30 bp, artificial
  4D3, 4F3 - CDR-H3
gaaactggggagggctggtacttcgatctc

SEQ ID NO: 70 - protein, 5 aa, artificial
  4D3, 4F3 - CDR-H1
SYDMD

SEQ ID NO: 71 - protein, 17 aa, artificial
  4D3, 4F3 - CDR-H2
VIWYDGSNKYYADSVRG

SEQ ID NO: 72 - protein, 10 aa, artificial
  4D3, 4F3 - CDR-H3
ETGEGWYFDL

SEQ ID NO: 73 - DNA, 15 bp, artificial
  4E10 - CDR-H1
agctatgacatgcac

SEQ ID NO: 74 - DNA, 51 bp, artificial; identical to SEQ ID NO: 2
  4E10 - CDR-H2

SEQ ID NO: 75 - DNA, 30 bp, artificial
  4E10 - CDR-H3
gagtataggtacagctggtactttgactac

SEQ ID NO: 76 - protein, 5 aa, artificial
  4E10 - CDR-H1
SYDMH

SEQ ID NO: 77 - protein, 17 aa, artificial
  4E10 - CDR-H2
VIWYDGSNKYYADSVKG

SEQ ID NO: 78 - protein, 10 aa, artificial
  4E10 - CDR-H3
EYRYSWYFDY

SEQ ID NO: 79 - DNA, 15 bp, artificial
  4F7 - CDR-H1
agttactcctggagc

SEQ ID NO: 80 - DNA, 48 bp, artificial
  4F7 - CDR-H2
tatatctattacagtgggagcaccaactacaacccctccctcaagagt

SEQ ID NO: 81 - DNA, 24 bp, artificial
  4F7 - CDR-H3
aactgggccttccactttgactac

SEQ ID NO: 82 - protein, 5 aa, artificial
  4F7 - CDR-H1
SYSWS

SEQ ID NO: 83 - protein, 16 aa, artificial
  4F7 - CDR-H2
YIYYSGSTNYNPSLKS

SEQ ID NO: 84 - protein, 8 aa, artificial
  4F7 - CDR-H3
NWAFHFDY

SEQ ID NO: 85 - DNA, 15 bp, artificial
  5E3 - CDR-H1
agctatagcatgcac

SEQ ID NO: 86 - DNA, 51 bp, artificial
  5E3 - CDR-H2
tccattagtagtagtagtagttacatatactacgcagactcagtgaagggc

SEQ ID NO: 87 - DNA, 42 bp, artificial
  5E3 - CDR-H3
ggggaaactggaactaactactactactacggtatggacgtc

SEQ ID NO: 88 - protein, 5 aa, artificial
  5E3 - CDR-H1
SYSMH

SEQ ID NO: 89 - protein, 17 aa, artificial
  5E3 - CDR-H2
SISSSSSYIYYADSVKG

SEQ ID NO: 90 - protein, 14 aa, artificial
  5E3 - CDR-H3
GETGTNYYYYGMDV

SEQ ID NO: 91 - DNA, 15 bp, artificial
  17H8, 23B6, 28D10 - CDR-H1
agttactactggagc

SEQ ID NO: 92 - DNA, 48 bp, artificial
  17H8, 23B6, 28D10 - CDR-H2
tatatctattacattgggagcaccaactacaacccctccctcaagagt

SEQ ID NO: 93 - DNA, 42 bp, artificial
  17H8, 23B6, 28D10 - CDR-H3
gattcccggtatagaagtggctggtacgatgcttttgatatc

SEQ ID NO: 94 - protein, 5 aa, artificial
  17H8, 23B6, 28D10 - CDR-H1
SYYWS

SEQ ID NO: 95 - protein, 16 aa, artificial
  17H8, 23B6, 28D10 - CDR-H2
YIYYIGSTNYNPSLKS

SEQ ID NO: 96 - protein, 14 aa, artificial
  17H8, 23B6, 28D10 - CDR-H3
DSRYRSGWYDAFDI

SEQ ID NO: 97 - DNA, 15 bp, artificial
  16C1 - CDR-H1
ggttactactggagc

SEQ ID NO: 98 - DNA, 48 bp, artificial; identical to SEQ ID NO: 92
  16C1 - CDR-H2

SEQ ID NO: 99 - DNA, 36 bp, artificial
  16C1 - CDR-H3
gatgggagcagtggctggtaccggtggttcgacccc

SEQ ID NO: 100 - protein, 5 aa, artificial
  16C1 - CDR-H1
GYYWS

SEQ ID NO: 101 - protein, 16 aa, artificial
  16C1 - CDR-H2
YIYYIGSTNYNPSLKS

SEQ ID NO: 102 - protein, 12 aa, artificial
  16C1 - CDR-H3
DGSSGWYRWFDP

SEQ ID NO: 103 - DNA, 15 bp, artificial
  16A4 - CDR-H1
agttactactggagc

SEQ ID NO: 104 - DNA, 48 bp, artificial
  16A4 - CDR-H2
tatatctattacagtgggagcaccaattacaacccctccctcaagagt

SEQ ID NO: 105 - DNA, 51 bp, artificial
  16A4 - CDR-H3
gatcaaaggcggatagcagcagctggtacccacttctacggtatggacgtc

SEQ ID NO: 106 - protein, 5 aa, artificial
  16A4 - CDR-H1
SYYWS

SEQ ID NO: 107 - protein, 16 aa, artificial
  16A4 - CDR-H2
YIYYSGSTNYNPSLKS

SEQ ID NO: 108 - protein, 17 aa, artificial
  16A4 - CDR-H3
DQRRIAAAGTHFYGMDV

SEQ ID NO: 109 - DNA, 15 bp, artificial
  16E2, 17E10, 20B12 - CDR-H1
agctatggcatgcac

SEQ ID NO: 110 - DNA, 51 bp, artificial
  16E2, 17E10, 20B12 - CDR-H2
gtgatatggtatgatggaagtaataaatactatgcagactccgtgaagggc

SEQ ID NO: 111 - DNA, 27 bp, artificial
  16E2, 17E10, 20B12 - CDR-H3
gacgggtgggagctgtcctttgactac

SEQ ID NO: 112 - protein, 5 aa, artificial
  16E2, 17E10, 20B12 - CDR-H1
SYGMH

SEQ ID NO: 113 - protein, 17 aa, artificial
  16E2, 17E10, 20B12 - CDR-H2
VIWYDGSNKYYADSVKG

SEQ ID NO: 114 - protein, 9 aa, artificial
  16E2, 17E10, 20B12 - CDR-H3
DGWELSFDY

SEQ ID NO: 115 - DNA, 15 bp, artificial
  22G10 - CDR-H1
agttatgccatgaac

SEQ ID NO: 116 - DNA, 51 bp, artificial
  22G10 - CDR-H2
actattagtggtggtggtgctaacacatactacgcagactccgtgaagggc

SEQ ID NO: 117 - DNA, 36 bp, artificial
  22G10 - CDR-H3
gggggaatggggggatactactacggtatggacgtc

SEQ ID NO: 118 - protein, 5 aa, artificial
  22G10 - CDR-H1
SYAMN

SEQ ID NO: 119 - protein, 17 aa, artificial
  22G10 - CDR-H2
TISGGGANTYYADSVKG

SEQ ID NO: 120 - protein, 12 aa, artificial
  22G10 - CDR-H3
GGMGGYYYGMDV

SEQ ID NO: 121 - DNA, 15 bp, artificial
  16H2, 20D3, 23E7  - CDR-H1
agctactttattcac

SEQ ID NO: 122 - DNA, 51 bp, artificial
  16H2, 20D3, 23E7  - CDR-H2
ataatcaaccctattagtgttagcacaagctacgcacagaagttccagggc

SEQ ID NO: 123 - DNA, 33 bp, artificial
  16H2, 20D3, 23E7  - CDR-H3
ggggggatacagctatggttacattttgactac

SEQ ID NO: 124 - protein, 5 aa, artificial
  16H2, 20D3, 23E7  - CDR-H1
SYFIH

SEQ ID NO: 125 - protein, 17 aa, artificial
  16H2, 20D3, 23E7  - CDR-H2
IINPISVSTSYAQKFQG

SEQ ID NO: 126 - protein, 11 aa, artificial
  16H2, 20D3, 23E7  - CDR-H3
GGIQLWLHFDY

SEQ ID NO: 127 - DNA, 15 bp, artificial
  22D1 - CDR-H1
agctactttattcac

SEQ ID NO: 128 - DNA, 51 bp, artificial; identical to SEQ ID NO: 122
  22D1 - CDR-H2

SEQ ID NO: 129 - DNA, 33 bp, artificial
  22D1 - CDR-H3
ggggggatacagctatggttacatttggactac

SEQ ID NO: 130 - protein, 5 aa, artificial
  22D1 - CDR-H1
SYFIH

SEQ ID NO: 131 - protein, 17 aa, artificial
  22D1 - CDR-H2
IINPISVSTSYAQKFQG

SEQ ID NO: 132 - protein, 11 aa, artificial
  22D1 - CDR-H3
GGIQLWLHLDY

SEQ ID NO: 133 - DNA, 15 bp, artificial
  25F8 - CDR-H1
agctactatattcac

SEQ ID NO: 134 - DNA, 51 bp, artificial
  25F8 - CDR-H2
ataatcaaccccagtggtggtagcacaaggtacgcacagaagttccagggc

SEQ ID NO: 135 - DNA, 33 bp, artificial
  25F8 - CDR-H3
gggggaatacagctatggttacattttgactac

SEQ ID NO: 136 - protein, 5 aa, artificial
  25F8 - CDR-H1
SYYIH

SEQ ID NO: 137 - protein, 17 aa, artificial
  25F8 - CDR-H2
IINPSGGSTRYAQKFQG

SEQ ID NO: 138 - protein, 11 aa, artificial
  25F8 - CDR-H3
GGIQLWLHFDY

SEQ ID NO: 139 - DNA, 15 bp, artificial
  26F12, 27B3 - CDR-H1
aactactatatgtcc

SEQ ID NO: 140 - DNA, 51 bp, artificial
  26F12, 27B3  - CDR-H2
ataatcaaccctagtggtggtgactcaacctacgcacagaagttccagggc

SEQ ID NO: 141 - DNA, 33 bp, artificial
  26F12, 27B3 - CDR-H3
ggggggatacaactatggttacattttgactac

SEQ ID NO: 142 - protein, 5 aa, artificial
  26F12, 27B3 - CDR-H1
NYYMS

SEQ ID NO: 143 - protein, 17 aa, artificial
  26F12, 27B3 - CDR-H2
IINPSGGDSTYAQKFQG

SEQ ID NO: 144 - protein, 11 aa, artificial
  26F12, 27B3 - CDR-H3
GGIQLWLHFDY

SEQ ID NO: 145 - DNA, 15 bp, artificial
  26D1 - CDR-H1
agctactatatgtcc

SEQ ID NO: 146 - DNA, 51 bp, artificial
  26D1 - CDR-H2
ataatccaccctagtggtggtgacacaacctacgcacagaagttccagggc

SEQ ID NO: 147 - DNA, 33 bp, artificial
  26D1 - CDR-H3
ggggggataaaactatggttacattttgactat

SEQ ID NO: 148 - protein, 5 aa, artificial
  26D1 - CDR-H1
SYYMS

SEQ ID NO: 149 - protein, 17 aa, artificial
  26D1 - CDR-H2
IIHPSGGDTTYAQKFQG

SEQ ID NO: 150 - protein, 11 aa, artificial
  26D1 - CDR-H3
GGIKLWLHFDY

SEQ ID NO: 151 - DNA, 15 bp, artificial
  25G10 - CDR-H1
ggttactactggagc

SEQ ID NO: 152 - DNA, 48 bp, artificial; identical to SEQ ID NO: 92
  25G10  CDR-H2

SEQ ID NO: 153 - DNA, 36 bp, artificial; identical to SEQ ID NO: 99
  25G10 - CDR-H3

SEQ ID NO: 154 - protein, 5 aa, artificial
  25G10 - CDR-H1
GYYWS

SEQ ID NO: 155 - protein, 16 aa, artificial
  25G10 - CDR-H2
YIYYIGSTNYNPSLKS

SEQ ID NO: 156 - protein, 12 aa, artificial
  25G10 - CDR-H3
DGSSGWYRWFDP

SEQ ID NO: 157 - DNA, 15 bp, artificial
  23A10 - CDR-H1
cgctatggcatacac

SEQ ID NO: 158 - DNA, 51 bp, artificial; identical to SEQ ID NO: 2
  23A10 - CDR-H2

SEQ ID NO: 159 - DNA, 48 bp, artificial
  23A10 - CDR-H3
agggccggtatacctggaactacgggctactactatggtatggacgtc

SEQ ID NO: 160 - protein, 5 aa, artificial
  23A10 - CDR-H1
RYGIH

SEQ ID NO: 161 - protein, 17 aa, artificial
  23A10 - CDR-H2
VIWYDGSNKYYADSVKG

SEQ ID NO: 162 - protein, 16 aa, artificial
  23A10 - CDR-H3
RAGIPGTTGYYYGMDV

SEQ ID NO: 163 - DNA, 15 bp, artificial
  19B5 - CDR-H1
agctactttattcac

SEQ ID NO: 164 - DNA, 51 bp, artificial
  19B5 - CDR-H2
attatcaaccctattagtgttagcacaagctacgcacagaagttccagggc

SEQ ID NO: 165 - DNA, 33 bp, artificial; identical to SEQ ID NO: 129
  19B5 - CDR-H3

SEQ ID NO: 166 - protein, 5 aa, artificial
  19B5 - CDR-H1
SYFIH

SEQ ID NO: 167 - protein, 17 aa, artificial
  19B5 - CDR-H2
IINPISVSTSYAQKFQG

SEQ ID NO: 168 - protein, 11 aa, artificial
  19B5 - CDR-H3
GGIQLWLHLDY

SEQ ID NO: 169 - DNA, 33 bp, artificial
  1D10, 2C12  - CDR-L1
tctggagatagattgggggaaaaatatacttgc

SEQ ID NO: 170 - DNA, 21 bp, artificial
  1D10, 2C12 - CDR-L2
caagataccaagcggccctca

SEQ ID NO: 171 - DNA, 27 bp, artificial
  1D10, 2C12 - CDR-L3
caggcgtgggacagcagcactgtggta

SEQ ID NO: 172 - protein, 11 aa, artificial
  1D10, 2C12 - CDR-L1
SGDRLGEKYTC

SEQ ID NO: 173 - protein, 7 aa, artificial
  1D10, 2C12 - CDR-L2
QDTKRPS

SEQ ID NO: 174 - protein, 9 aa, artificial
  1D10, 2C12 - CDR-L3
QAWDSSTVV

SEQ ID NO: 175 - DNA, 36 bp, artificial
  1F10 - CDR-L1
agggccagtcggagtattagcagcagctacttagcc

SEQ ID NO: 176 - DNA, 21 bp, artificial
  1F10 - CDR-L2
ggtccatccagcagggccact

SEQ ID NO: 177 - DNA, 24 bp, artificial
  1F10 - CDR-L3
cagcagtatggtagctcattcact

SEQ ID NO: 178 - protein, 12 aa, artificial
  1F10 - CDR-L1
RASRSISSSYLA

SEQ ID NO: 179 - protein, 7 aa, artificial
  1F10 - CDR-L2
GPSSRAT

SEQ ID NO: 180 - protein, 8 aa, artificial
  1F10 - CDR-L3
QQYGSSFT

SEQ ID NO: 181 - DNA, 48 bp, artificial
  2C12_LC#1 - CDR-L1
aggtctagtcaaagcctcgtatacagtgatggaaacacctacttgaat

SEQ ID NO: 182 - DNA, 21 bp, artificial
  2C12_LC#1 - CDR-L2
aaggtttctaactgggactct

SEQ ID NO: 183 - DNA, 27 bp, artificial
  2C12_LC#1 - CDR-L3
atgcaaggtatagtgtggccgtgcagt

SEQ ID NO: 184 - protein, 16 aa, artificial
  2C12_LC#1 - CDR-L1
RSSQSLVYSDGNTYLN

SEQ ID NO: 185 - protein, 7 aa, artificial
  2C12_LC#1 - CDR-L2
KVSNWDS

SEQ ID NO: 186 - protein, 9 aa, artificial
  2C12_LC#1 - CDR-L3
MQGIVWPCS

SEQ ID NO: 187 - DNA, 48 bp, artificial; identical to SEQ ID NO: 181
  2G6_LC#1 - CDR-L1

SEQ ID NO: 188 - DNA, 21 bp, artificial
  2G6_LC#1 - CDR-L2
caggtttctaactgggactct

SEQ ID NO: 189 - DNA, 27 bp, artificial
  2G6_LC#1 - CDR-L3
atgcaagatacactgtggccgtgcagt

SEQ ID NO: 190 - protein, 16 aa, artificial
  2G6_LC#1 - CDR-L1
RSSQSLVYSDGNTYLN

SEQ ID NO: 191 - protein, 7 aa, artificial
  2G6_LC#1 - CDR-L2
QVSNWDS

SEQ ID NO: 192 - protein, 9 aa, artificial
  2G6_LC#1 - CDR-L3
MQDTLWPCS

SEQ ID NO: 193 - DNA, 33 bp, artificial
  2G6 - CDR-L1
tctggagataggttgggggaaaaatatacttgc

SEQ ID NO: 194 - DNA, 21 bp, artificial
  2G6 - CDR-L2
caagataccaagcggccctca

SEQ ID NO: 195 - DNA, 27 bp, artificial
  2G6 - CDR-L3
caggcgtgggacagcagcactgtggta

SEQ ID NO: 196 - protein, 11 aa, artificial
  2G6 - CDR-L1
SGDRLGEKYTC

SEQ ID NO: 197 - protein, 7 aa, artificial
  2G6 - CDR-L2
QDTKRPS

SEQ ID NO: 198 - protein, 9 aa, artificial
  2G6 - CDR-L3
QAWDSSTVV

SEQ ID NO: 199 - DNA, 33 bp, artificial; identical to SEQ ID NO: 169
  2H12 - CDR-L1

SEQ ID NO: 200 - DNA, 21 bp, artificial
  2H12 - CDR-L2
caagataccaagcggccctca

SEQ ID NO: 201 - DNA, 27 bp, artificial
  2H12 - CDR-L3
caggcgtgggacagcagcactgtggta

SEQ ID NO: 202 - protein, 11 aa, artificial
  2H12 - CDR-L1
SGDRLGEKYTC

SEQ ID NO: 203 - protein, 7 aa, artificial
  2H12 - CDR-L2
QDTKRPS

SEQ ID NO: 204 - protein, 9 aa, artificial
  2H12 - CDR-L3
QAWDSSTVV

SEQ ID NO: 205 - DNA, 48 bp, artificial; identical to SEQ ID NO: 181
  2H12_LC#2 - CDR-L1

SEQ ID NO: 206 - DNA, 21 bp, artificial
  2H12_LC#2 - CDR-L2
aaggtttctaactgggactct

SEQ ID NO: 207 - DNA, 27 bp, artificial
  2H12_LC#2 - CDR-L3
atgcaagatacactgtggccgtgcagt

SEQ ID NO: 208 - protein, 16 aa, artificial
  2H12_LC#2 - CDR-L1
RSSQSLVYSDGNTYLN

SEQ ID NO: 209 - protein, 7 aa, artificial
  2H12_LC#2 - CDR-L2
KVSNWDS

SEQ ID NO: 210 - protein, 9 aa, artificial
  2H12_LC#2 - CDR-L3
MQDTLWPCS

SEQ ID NO: 211 - DNA, 36 bp, artificial
  4A2, 5B4, 5C5  - CDR-L1
agggccagtcggaatattagcagcagctacttagcc

SEQ ID NO: 212 - DNA, 21 bp, artificial
  4A2, 5B4, 5C5  - CDR-L2
ggtccatccagcagggccact

SEQ ID NO: 213 - DNA, 24 bp, artificial
  4A2, 5B4, 5C5  - CDR-L3
cagcagtatggtagctcattcact

SEQ ID NO: 214 - protein, 12 aa, artificial
  4A2, 5B4, 5C5  - CDR-L1
RASRNISSSYLA

SEQ ID NO: 215 - protein, 7 aa, artificial
  4A2, 5B4, 5C5  - CDR-L2
GPSSRAT

SEQ ID NO: 216 - protein, 8 aa, artificial
  4A2, 5B4, 5C5  - CDR-L3
QQYGSSFT

SEQ ID NO: 217 - DNA, 42 bp, artificial
  4A9 - CDR-L1
actgggagcagctccaacatcgggacaggttatgctgtacac

SEQ ID NO: 218 - DNA, 21 bp, artificial
  4A9 - CDR-L2
ggtaacaacaatcggccctca

SEQ ID NO: 219 - DNA, 33 bp, artificial
  4A9 - CDR-L3
cagtcctatgacagcagactgagtggttgggtg

SEQ ID NO: 220 - protein, 14 aa, artificial
  4A9 - CDR-L1
TGSSSNIGTGYAVH

SEQ ID NO: 221 - protein, 7 aa, artificial
  4A9 - CDR-L2
GNNNRPS

SEQ ID NO: 222 - protein, 11 aa, artificial
  4A9 - CDR-L3
QSYDSRLSGWV

SEQ ID NO: 223 - DNA, 36 bp, artificial
  4B10, 4C2 - CDR-L1
agggccagtcagagtgttagcaacacctacttagcc

SEQ ID NO: 224 - DNA, 21 bp, artificial
  4B10, 4C2 - CDR-L2
ggtgcatccagcagggccact

SEQ ID NO: 225 - DNA, 24 bp, artificial
  4B10, 4C2 - CDR-L3
cagcagtacagtaactcgtggacg

SEQ ID NO: 226 - protein, 12 aa, artificial
  4B10, 4C2 - CDR-L1
RASQSVSNTYLA

SEQ ID NO: 227 - protein, 7 aa, artificial
  4B10, 4C2 - CDR-L2
GASSRAT

SEQ ID NO: 228 - protein, 8 aa, artificial
  4B10, 4C2 - CDR-L3
QQYSNSWT

SEQ ID NO: 229 - DNA, 36 bp, artificial; identical to SEQ ID NO: 223
  4D2 - CDR-L1

SEQ ID NO: 230 - DNA, 21 bp, artificial
  4D2 - CDR-L2
ggtgcatccagcagggccgct

SEQ ID NO: 231 - DNA, 24 bp, artificial
  4D2 - CDR-L3
cagcagtatagtaactcgtggacg

SEQ ID NO: 232 - protein, 12 aa, artificial
  4D2 - CDR-L1
RASQSVSNTYLA

SEQ ID NO: 233 - protein, 7 aa, artificial
  4D2 - CDR-L2
GASSRAA

SEQ ID NO: 234 - protein, 8 aa, artificial
  4D2 - CDR-L3
QQYSNSWT

SEQ ID NO: 235 - DNA, 36 bp, artificial
  4D3, 4F3 - CDR-L1
agggccagtcagagtgttagcagcagctacttagcc

SEQ ID NO: 236 - DNA, 21 bp, artificial
  4D3, 4F3 - CDR-L2
ggtgcatccagcagggccact

SEQ ID NO: 237 - DNA, 24 bp, artificial
  4D3, 4F3 - CDR-L3
cagcagtatggtagctcgtggacg

SEQ ID NO: 238 - protein, 12 aa, artificial
  4D3, 4F3 - CDR-L1
RASQSVSSSYLA

SEQ ID NO: 239 - protein, 7 aa, artificial
  4D3, 4F3 - CDR-L2
GASSRAT

SEQ ID NO: 240 - protein, 8 aa, artificial
  4D3, 4F3 - CDR-L3
QQYGSSWT

SEQ ID NO: 241 - DNA, 36 bp, artificial
  4E10 - CDR-L1
agggccagtcagagtgttggcagcagctacttagcc

SEQ ID NO: 242 - DNA, 21 bp, artificial
  4E10 - CDR-L2
ggtgcatccagcagggtcact

SEQ ID NO: 243 - DNA, 24 bp, artificial
  4E10 - CDR-L3
cagcaatatagtaactcgtggacg

SEQ ID NO: 244 - protein, 12 aa, artificial
  4E10 - CDR-L1
RASQSVGSSYLA

SEQ ID NO: 245 - protein, 7 aa, artificial
  4E10 - CDR-L2
GASSRVT

SEQ ID NO: 246 - protein, 8 aa, artificial
  4E10 - CDR-L3
QQYSNSWT

SEQ ID NO: 247 - DNA, 42 bp, artificial
  4F7 - CDR-L1
actgggagcagctccaatatcgggacaggttatgatgtacac

SEQ ID NO: 248 - DNA, 21 bp, artificial
  4F7 - CDR-L2
ggtaacagcaatcggccctca

SEQ ID NO: 249 - protein, 33 aa, artificial
  4F7 - CDR-L3
CAGTCCTATGACAGCAGTCTGAGTGGTTGGGTG

SEQ ID NO: 250 - protein, 14 aa, artificial
  4F7 - CDR-L1
TGSSSNIGTGYDVH

SEQ ID NO: 251 - protein, 7 aa, artificial
  4F7 - CDR-L2
GNSNRPS

SEQ ID NO: 252 - protein, 11 aa, artificial
  4F7 - CDR-L3
QSYDSSLSGWV

SEQ ID NO: 253 - DNA, 33 bp, artificial
  5E3 - CDR-L1
tctggagataaattgggggatgaatatgcttgc

SEQ ID NO: 254 - DNA, 21 bp, artificial
  5E3 - CDR-L2
caagatagcaagcggccctca

SEQ ID NO: 255 - DNA, 27 bp, artificial
  5E3 - CDR-L3
caggcgtgggacagcagcactgtggta

SEQ ID NO: 256 - protein, 11 aa, artificial
  5E3 - CDR-L1
SGDKLGDEYAC

SEQ ID NO: 257 - protein, 7 aa, artificial
  5E3 - CDR-L2
QDSKRPS

SEQ ID NO: 258 - protein, 9 aa, artificial
  5E3 - CDR-L3
QAWDSSTVV

SEQ ID NO: 259 - DNA, 36 bp, artificial
  17H8, 23B6, 28D10 - CDR-L1
agggccagtcagagtgttgccggcagctacctagcc

SEQ ID NO: 260 - DNA, 21 bp, artificial
  17H8, 23B6, 28D10 - CDR-L2
ggtgcatccagcagggccact

SEQ ID NO: 261 - DNA, 27 bp, artificial
  17H8, 23B6, 28D10 - CDR-L3
cagcagtatggtaaatcaccgatcacc

SEQ ID NO: 262 - protein, 12 aa, artificial
  17H8, 23B6, 28D10 - CDR-L1
RASQSVAGSYLA

SEQ ID NO: 263 - protein, 7 aa, artificial
  17H8, 23B6, 28D10 - CDR-L2
GASSRAT

SEQ ID NO: 264 - protein, 9 aa, artificial
  17H8, 23B6, 28D10 - CDR-L3
QQYGKSPIT

SEQ ID NO: 265 - DNA, 36 bp, artificial
  16C1 - CDR-L1
agggccagccagagtgttagcagcagctacttagcc

SEQ ID NO: 266 - DNA, 21 bp, artificial
  16C1 - CDR-L2
ggtgcatccagcagggccact

SEQ ID NO: 267 - DNA, 27 bp, artificial
  16C1 - CDR-L3
cagcagtatggtaactcaccgctcact

SEQ ID NO: 268 - protein, 12 aa, artificial
  16C1 - CDR-L1
RASQSVSSSYLA

SEQ ID NO: 269 - protein, 7 aa, artificial
  16C1 - CDR-L2
GASSRAT

SEQ ID NO: 270 - protein, 9 aa, artificial
  16C1 - CDR-L3
QQYGNSPLT

SEQ ID NO: 271 - DNA, 36 bp, artificial
  16A4 - CDR-L1
agggccagtcagagtgttagcagcagttatttagcc

SEQ ID NO: 272 - DNA, 21 bp, artificial
  16A4 - CDR-L2
ggtacatccagcagggccact

SEQ ID NO: 273 - DNA, 27 bp, artificial
  16A4 - CDR-L3
cagcagtacggtagctcacctttcact

SEQ ID NO: 274 - protein, 12 aa, artificial
  16A4 - CDR-L1
RASQSVSSSYLA

SEQ ID NO: 275 - protein, 7 aa, artificial
  16A4 - CDR-L2
GTSSRAT

SEQ ID NO: 276 - protein, 9 aa, artificial
  16A4 - CDR-L3
QQYGSSPFT

SEQ ID NO: 277 - DNA, 33 bp, artificial
  16E2, 17E10, 20B12  - CDR-L1
cgggcgagtcagggcattagcaattatttagcc

SEQ ID NO: 278 - DNA, 21 bp, artificial
  16E2, 17E10, 20B12  - CDR-L2
gctgcatccagtttgcaaagt

SEQ ID NO: 279 - DNA, 27 bp, artificial
  16E2, 17E10, 20B12  - CDR-L3
caacactattttacttaccctcggacg

SEQ ID NO: 280 - protein, 11 aa, artificial
  16E2, 17E10, 20B12  - CDR-L1
RASQGISNYLA

SEQ ID NO: 281 - protein, 7 aa, artificial
  16E2, 17E10, 20B12  - CDR-L2
AASSLQS

SEQ ID NO: 282 - protein, 9 aa, artificial
  16E2, 17E10, 20B12  - CDR-L3
QHYFTYPRT

SEQ ID NO: 283 - DNA, 33 bp, artificial
  22G10 - CDR-L1
agggccagtcagagtattagcagcaacttagcc

SEQ ID NO: 284 - DNA, 21 bp, artificial
  22G10 - CDR-L2
ggtgcatttaccagggccact

SEQ ID NO: 285 - DNA, 27 bp, artificial
  22G10 - CDR-L3
cagcagtataattactggccgctcact

SEQ ID NO: 286 - protein, 11 aa, artificial
  22G10 - CDR-L1
RASQSISSNLA

SEQ ID NO: 287 - protein, 7 aa, artificial
  22G10 - CDR-L2
GAFTRAT

SEQ ID NO: 288 - protein, 9 aa, artificial
  22G10 - CDR-L3
QQYNYWPLT

SEQ ID NO: 289 - DNA, 39 bp, artificial
  16H2, 20D3, 23E7 - CDR-L1
tctggaagcagctccaacatcggaagtaattttgtaaac

SEQ ID NO: 290 - DNA, 21 bp, artificial
  16H2, 20D3, 23E7 - CDR-L2
actaataatcagcggccctca

SEQ ID NO: 291 - DNA, 33 bp, artificial
  16H2, 20D3, 23E7 - CDR-L3
gcaacatgggatgacagcctgaatggttgggtg

SEQ ID NO: 292 - protein, 13 aa, artificial
  16H2, 20D3, 23E7 - CDR-L1
SGSSSNIGSNFVN

SEQ ID NO: 293 - protein, 7 aa, artificial
  16H2, 20D3, 23E7 - CDR-L2
TNNQRPS

SEQ ID NO: 294 - protein, 11 aa, artificial
  16H2, 20D3, 23E7 - CDR-L3
ATWDDSLNGWV

SEQ ID NO: 295 - DNA, 39 bp, artificial
  22D1 - CDR-L1
tctggaagcagctccaacatcggaagcaattttgtaaac

SEQ ID NO: 296 - DNA, 21 bp, artificial
  22D1 - CDR-L2
actaataatcagcggccctca

SEQ ID NO: 297 - DNA, 33 bp, artificial
  22D1 - CDR-L3
gcaacatgggatgacagtatgaatggttgggtg

SEQ ID NO: 298 - protein, 13 aa, artificial
  22D1 - CDR-L1
SGSSSNIGSNFVN

SEQ ID NO: 299 - protein, 7 aa, artificial
  22D1 - CDR-L2
TNNQRPS

SEQ ID NO: 300 - protein, 11 aa, artificial
  22D1 - CDR-L3
ATWDDSMNGWV

SEQ ID NO: 301 - DNA, 39 bp, artificial
  25F8 - CDR-L1
tctggaagcagctccaacatcggaaggaattttgtaaac

SEQ ID NO: 302 - DNA, 21 bp, artificial
  25F8 - CDR-L2
actaataatcagcggccctca

SEQ ID NO: 303 - DNA, 33 bp, artificial
  25F8 - CDR-L3
gcagcatgggatgacagcctgaatggttgggtg

SEQ ID NO: 304 - protein, 13 aa, artificial
  25F8 - CDR-L1
SGSSSNIGRNFVN

SEQ ID NO: 305 - protein, 7 aa, artificial
  25F8 - CDR-L2
TNNQRPS

SEQ ID NO: 306 - protein, 11 aa, artificial
  25F8 - CDR-L3
AAWDDSLNGWV

SEQ ID NO: 307 - DNA, 39 bp, artificial
  26F12, 27B3 - CDR-L1
tctggaagccgctccaacatcggaagtaattttgtaaac

SEQ ID NO: 308 - DNA, 21 bp, artificial
  26F12, 27B3 - CDR-L2
actaattatcagcggccctca

SEQ ID NO: 309 - DNA, 33 bp, artificial
  26F12, 27B3 - CDR-L3
gcagtatgggatgacagcctgaatggttgggtg

SEQ ID NO: 310 - protein, 13 aa, artificial
  26F12, 27B3 - CDR-L1
SGSRSNIGSNFVN

SEQ ID NO: 311 - protein, 7 aa, artificial
  26F12, 27B3 - CDR-L2
TNYQRPS

SEQ ID NO: 312 - protein, 11 aa, artificial
  26F12, 27B3 - CDR-L3
AVWDDSLNGWV

SEQ ID NO: 313 - DNA, 39 bp, artificial; identical to SEQ ID NO: 307
  26D1 - CDR-L1

SEQ ID NO: 314 - DNA, 21 bp, artificial
  26D1 - CDR-L2
actaataatcagcggccctca

SEQ ID NO: 315 - DNA, 33 bp, artificial; identical to SEQ ID NO: 309
  26D1 - CDR-L3

SEQ ID NO: 316 - protein, 13 aa, artificial
  26D1 - CDR-L1
SGSRSNIGSNFVN

SEQ ID NO: 317 - protein, 7 aa, artificial
  26D1 - CDR-L2
TNNQRPS

SEQ ID NO: 318 - protein, 11 aa, artificial
  26D1 - CDR-L3
AVWDDSLNGWV

SEQ ID NO: 319 - DNA, 36 bp, artificial; identical to SEQ ID NO: 235
  25G10 - CDR-L1

SEQ ID NO: 320 - DNA, 21 bp, artificial
  25G10 - CDR-L2
ggtgcatccagcagggccact

SEQ ID NO: 321 - DNA, 27 bp, artificial
  25G10 - CDR-L3
cagcagtatggtaactcaccgctcact

SEQ ID NO: 322 - protein, 12 aa, artificial
  25G10 - CDR-L1
RASQSVSSSYLA

SEQ ID NO: 323 - protein, 7 aa, artificial
  25G10 - CDR-L2
GASSRAT

SEQ ID NO: 324 - protein, 9 aa, artificial
  25G10 - CDR-L3
QQYGNSPLT

SEQ ID NO: 325 - DNA, 33 bp, artificial
  23A10 - CDR-L1
tctggagatagattgggggagaaatatgtttgc

SEQ ID NO: 326 - DNA, 21 bp, artificial
  23A10 - CDR-L2
caagataataagtggccctca

SEQ ID NO: 327 - DNA, 27 bp, artificial
  23A10 - CDR-L3
caggcgtgggacagcagcactgtggta

SEQ ID NO: 328 - protein, 11 aa, artificial
  23A10 - CDR-L1
SGDRLGEKYVC

SEQ ID NO: 329 - protein, 7 aa, artificial
  23A10 - CDR-L2
QDNKWPS

SEQ ID NO: 330 - protein, 9 aa, artificial
  23A10 - CDR-L3
QAWDSSTVV

SEQ ID NO: 331 - DNA, 39 bp, artificial
  19B5 - CDR-L1
tctggaagcaggtccaacatcggaagcaattttgtaaac

SEQ ID NO: 332 - DNA, 21 bp, artificial
  19B5 - CDR-L2
actaataatcagcggccctca

SEQ ID NO: 333 - DNA, 33 bp, artificial; identical to SEQ ID NO: 297
  19B5 - CDR-L3

SEQ ID NO: 334 - protein, 13 aa, artificial
  19B5 - CDR-L1
SGSRSNIGSNFVN

SEQ ID NO: 335 - protein, 7 aa, artificial
  19B5 - CDR-L2
TNNQRPS

SEQ ID NO: 336 - protein, 11 aa, artificial
  19B5 - CDR-L3
ATWDDSMNGWV

SEQ ID NO: 337 - DNA, 366 bp, artificial
  17H8, 23B6, 28D10 - HCVR
caggtgcagctgcaggagtcgggcccaggactggtgaagccttcggagaccctgtccctcacgtgcactgtctctggtggctccatcaatagttactactggagctggatccggcagcccccagggaagggactggagtggattgggtatatctattacattgggagcaccaactacaacccctccctcaagagtcgcgtcaccatatcagtagacacgtccaagaaccagttctccctgaagctgagctctgtgaccgctgcggacacggccctgtattactgtgcgagagattcccggtatagaagtggctggtacgatgcttttgatatctggggccaagggacaatggtcaccgtctcttca

SEQ ID NO: 338 - protein, 122 aa, artificial
  17H8, 23B6, 28D10 - HCVR
QVQLQESGPGLVKPSETLSLTCTVSGGSINSYYWSWIRQPPGKGLEWIGYIYYIGSTNYNPSLKSRVTISVDTSKNQFSLKLSSVTAADTALYYCARDSRYRSGWYDAFDIWGQGTMVTVSS

SEQ ID NO: 339 - DNA, 360 bp, artificial
  4A2, 5B4, 5C5  - HCVR
caggtgcagctgcaggagtcgggcccaggactggtgaagccttcacagaccctgtccctcacctgcactgtctctggtggctccatcagcagtagtggttactactggagctggatccgccagcacccagggaagggcctggagtggattgggtacatctattacactgggagcgcctactacaacccgtccctcaagagtcgagttaccatatcagtagacacgtctaagaaccagttctccctgaagctgagctctgtgactgccgcggacacggccgtgtattactgtgcgagagatggaagcagtggctggtacttccagtattggggccagggcaccctggtcaccgtctcctca

SEQ ID NO: 340 - protein, 120 aa, artificial
  4A2, 5B4, 5C5  - HCVR
QVQLQESGPGLVKPSQTLSLTCTVSGGSISSSGYYWSWIRQHPGKGLEWIGYIYYTGSAYYNPSLKSRVTISVDTSKNQFSLKLSSVTAADTAVYYCARDGSSGWYFQYWGQGTLVTVSS

SEQ ID NO: 341 - DNA, 360 bp, artificial
  16H2, 20D3, 23E7  - HCVR
caggtgcagctggtgcagtctggggctgaggtgaagaagcctggggcctcagtgaaggtttcctgcaaggtttctggatacaccttcaccagctactttattcactgggtgcgccaggcccctggacaagggcttgagtggatgggaataatcaaccctattagtgttagcacaagctacgcacagaagttccagggcagagtcaccatgaccagggacacgtccacgagcacagtcttcatggagctgagcagcctgagatctgaggacacggccgtgtattactgtgcgcgaggggggatacagctatggttacattttgactactggggccagggaaccctggtcaccgtctcctca

SEQ ID NO: 342 - protein, 120 aa, artificial
  16H2, 20D3, 23E7  - HCVR
QVQLVQSGAEVKKPGASVKVSCKVSGYTFTSYFIHWVRQAPGQGLEWMGIINPISVSTSYAQKFQGRVTMTRDTSTSTVFMELSSLRSEDTAVYYCARGGIQLWLHFDYWGQGTLVTVSS

SEQ ID NO: 343 - DNA, 360 bp, artificial
  26F12, 27B3 - HCVR
caggtgcagttggtgcagtctggggctgaggtgaagaagcctggggcctcagtgaaggtttcctgcaaggcatctagatacaccttcaccaactactatatgtcctgggtgcgacaggcccctggacaagggcttgagtggatgggaataatcaaccctagtggtggtgactcaacctacgcacagaagttccagggcagactcaccatgaccggggacacgtccacgagcacagtctacatggagctgagcagcctgagatctgaggacacggccgtgtattactgtgcgagaggggggatacaactatggttacattttgactactggggccagggaaccctggtcaccgtctcctca

SEQ ID NO: 344 - protein, 120 aa, artificial
  26F12, 27B3 - HCVR
QVQLVQSGAEVKKPGASVKVSCKASRYTFTNYYMSWVRQAPGQGLEWMGIINPSGGDSTYAQKFQGRLTMTGDTSTSTVYMELSSLRSEDTAVYYCARGGIQLWLHFDYWGQGTLVTVSS

SEQ ID NO: 345 - DNA, 357 bp, artificial
  4B10, 4C2 - HCVR
caggtgcagttggtggagtctgggggaggcgtggtccagcctgggaggtccctgagactctcctgtgcagcctctggattcaccttcagtagctatgacatgcactgggtccgccaggctccaggcaaggggctggagtgggtggcagttatatcatatgatggaactaatgaatactatgcagactccgtgaagggccgattcaccatctccagagacacttccaagaacacgctgtatttgcaaatgaacagcctgagagctgaggacacggctgtatattactgtgcgagagaacgatattttgactggtcttttgactactggggccagggaaccctggtcagtgtctcctca

SEQ ID NO: 346 - protein, 119 aa, artificial
  4B10, 4C2 - HCVR
QVQLVESGGGVVQPGRSLRLSCAASGFTFSSYDMHWVRQAPGKGLEWVAVISYDGTNEYYADSVKGRFTISRDTSKNTLYLQMNSLRAEDTAVYYCARERYFDWSFDYWGQGTLVSVSS

SEQ ID NO: 347 - DNA, 357 bp, artificial
  4D3, 4F3 - HCVR
caggtgcagctggtggagtctgggggaggcgtggtccagcctgggaggtccctgagactctcctgtgcagcgtctggattctccttcagtagctatgacatggactgggtccgccagactccaggcaaggggctggagtgggtggcagttatatggtatgatggaagtaataaatactatgcagactccgtgaggggccgattcaccatctccagagacaattccaagaacacgctgtttctgcaaatgaacagcctgagagtcgaggacacggctgtgtattactgtgcgagagaaactggggagggctggtacttcgatctctggggccgtggcaccctggtcactgtctcctca

SEQ ID NO: 348 - protein, 119 aa, artificial
  4D3, 4F3 - HCVR
QVQLVESGGGVVQPGRSLRLSCAASGFSFSSYDMDWVRQTPGKGLEWVAVIWYDGSNKYYADSVRGRFTISRDNSKNTLFLQMNSLRVEDTAVYYCARETGEGWYFDLWGRGTLVTVSS

SEQ ID NO: 349 - DNA, 354 bp, artificial
  16E2, 17E10, 20B12  - HCVR
caggtgcagctggtggagtctgggggaggcgtggtccagcctgggaggtccctgagactctcctgtgcagcgtctggattcatcttcagtagctatggcatgcactgggtccgccagactccaggcaaggggctggagtgggtggcagtgatatggtatgatggaagtaataaatactatgcagactccgtgaagggccgattcaccatctccagagacatttccaagaacacgctgtatctgcaaatgaacagcctgagagtcgaggacacggctgtgtattactgtgcgagagacgggtgggagctgtcctttgactactggggccagggaaccctggtcaccgtctcctca

SEQ ID NO: 350 - protein, 118 aa, artificial
  16E2, 17E10, 20B12  - HCVR
QVQLVESGGGVVQPGRSLRLSCAASGFIFSSYGMHWVRQTPGKGLEWVAVIWYDGSNKYYADSVKGRFTISRDISKNTLYLQMNSLRVEDTAVYYCARDGWELSFDYWGQGTLVTVSS

SEQ ID NO: 351 - DNA, 375 bp, artificial
  1D10, 2C12 - HCVR
caggtgcagctggtggagtctgggggaggcgtggtccagcctgggaggtccctgagactctcctgtgcagcgtctggattcaccttcagtagctatggcatgcactgggtccgccaggctccaggcaaggggctggagtgggtgtcagttatatggtatgatggaagtaataaatactatgcagactccgtgaagggccgattcaccatctccagagacaattccaagaacacgctgtatctgcaaatgaatagcctgagagctgaggacacggctgtgtattactgcgcgagaagggccggtataataggaactacaggctactactacggtatggacgtctggggccaagggaccacggtcaccgtctcctca

SEQ ID NO: 352 - protein, 125 aa, artificial
  1D10, 2C12 - HCVR
QVQLVESGGGVVQPGRSLRLSCAASGFTFSSYGMHWVRQAPGKGLEWVSVIWYDGSNKYYADSVKGRFTISRDNSKNTLYLQMNSLRAEDTAVYYCARRAGIIGTTGYYYGMDVWGQGTTVTVSS

SEQ ID NO: 353 - DNA, 360 bp, artificial
  16C1 - HCVR
caggtgcagctgcaggagtcgggcccaggactggtgaagccttcggagaccctgtccctcacttgtactgtctctggtggctccatcagtggttactactggagctggatccggcagcccccagggaagggactggagtggattgggtatatctattacattgggagcaccaactacaacccctccctcaagagtcgagtcaccatgtcaatagacacgtccaagaaccagttctccctgacgctgagctctttgaccgctgcggacacggccgtgtatttctgtgcgagagatgggagcagtggctggtaccggtggttcgacccctggggccagggaaccctggtcaccgtctcctca

SEQ ID NO: 354 - protein, 120 aa, artificial
  16C1 - HCVR
QVQLQESGPGLVKPSETLSLTCTVSGGSISGYYWSWIRQPPGKGLEWIGYIYYIGSTNYNPSLKSRVTMSIDTSKNQFSLTLSSLTAADTAVYFCARDGSSGWYRWFDPWGQGTLVTVSS

SEQ ID NO: 355 - DNA, 360 bp, artificial
  25G10 - HCVR
caggtgcagctgcaggagtcgggcccaggactggtgaagccttcggagaccctgtccctcacctgcactgtctctggtggctccatcagtggttactactggagctggatccggcagcccccagggaagggactggagtggattgggtatatctattacattgggagcaccaactacaacccctccctcaagagtcgagtcaccatgtcagtagacacgtccaagaaccagttctccctgaagctgagctctgtgaccgctgcggacacggccgtgtattactgtgcgagagatgggagcagtggctggtaccggtggttcgacccctggggccagggaaccctggtcaccgtctcctca

SEQ ID NO: 356 - protein, 360 aa, artificial
  25G10 - HCVR
CAGGTGCAGCTGCAGGAGTCGGGCCCAGGACTGGTGAAGCCTTCGGAGACCCTGTCCCTCACCTGCACTGTCTCTGGTGGCTCCATCAGTGGTTACTACTGGAGCTGGATCCGGCAGCCCCCAGGGAAGGGACTGGAGTGGATTGGGTATATCTATTACATTGGGAGCACCAACTACAACCCCTCCCTCAAGAGTCGAGTCACCATGTCAGTAGACACGTCCAAGAACCAGTTCTCCCTGAAGCTGAGCTCTGTGACCGCTGCGGACACGGCCGTGTATTACTGTGCGAGAGATGGGAGCAGTGGCTGGTACCGGTGGTTCGACCCCTGGGGCCAGGGAACCCTGGTCACCGTCTCCTCA

SEQ ID NO: 357 - DNA, 375 bp, artificial
  16A4 - HCVR
caggtgcagctgcaggagtcgggcccaggactggcgaagccttcggagaccctgtccctcacctgcactgtctctggtgactccatcactagttactactggagctggatccggcagcccccagggaagggactggagtggattgggtatatctattacagtgggagcaccaattacaacccctccctcaagagtcgagtcaccatatcagtagacacgtccaagaaccagttctccctgaagctgagttctgtgaccgctgcggacacggccgtgtattactgtgcgagagatcaaaggcggatagcagcagctggtacccacttctacggtatggacgtctggggccaagggaccacggtcaccgtctcctca

SEQ ID NO: 358 - protein, 125 aa, artificial
  16A4 - HCVR
QVQLQESGPGLAKPSETLSLTCTVSGDSITSYYWSWIRQPPGKGLEWIGYIYYSGSTNYNPSLKSRVTISVDTSKNQFSLKLSSVTAADTAVYYCARDQRRIAAAGTHFYGMDVWGQGTTVTVSS

SEQ ID NO: 359 - DNA, 360 bp, artificial
  1F10 - HCVR
caggtgcagctgcaggagtcgggcccaggactggtgaagccttcacagaccctgtccctcacctgcactgtctctggtggctccatcagcagtggtggttactactggagctggatccgccagcacccagggaagggcctggagtggattgggtacatctattacagtgggagcacctactacaacccgtccctcacgagtcgagttaccatatcagtagacacgtctaagaaccagttctccctgaagctgagctctgtgactgccgcggacacggccgtgtattactgtgcgagagatggaagcagtggctggtacttccagcactggggccagggcaccctggtcaccgtctcctca

SEQ ID NO: 360 - protein, 120 aa, artificial
  1F10 - HCVR
QVQLQESGPGLVKPSQTLSLTCTVSGGSISSGGYYWSWIRQHPGKGLEWIGYIYYSGSTYYNPSLTSRVTISVDTSKNQFSLKLSSVTAADTAVYYCARDGSSGWYFQHWGQGTLVTVSS

SEQ ID NO: 361 - DNA, 348 bp, artificial
  4A9 - HCVR
caggtgcagctgcaggagtcgggcccaggactggtgaagccttcggagaccctgtccctcacctgcactgtctctggtggctccatcagtggttactactggagctggatccggcagcccccaggaaagggactggagtggtttgcatatttctcttacagtgggagcaccaactacaacccctccctcaagagtcgagtcaccttatcagtagacacgtccaagaaccagttctccctgaagctgagctctgtgaccgctgcggacacggccgtgtattactgtgcgaggaactgggccttccactttgacttctggggccagggaaccctggtcaccgtctcctca

SEQ ID NO: 362 - protein, 116 aa, artificial
  4A9 - HCVR
QVQLQESGPGLVKPSETLSLTCTVSGGSISGYYWSWIRQPPGKGLEWFAYFSYSGSTNYNPSLKSRVTLSVDTSKNQFSLKLSSVTAADTAVYYCARNWAFHFDFWGQGTLVTVSS

SEQ ID NO: 363 - DNA, 348 bp, artificial
  4F7 - HCVR
caggtgcagctgcaggagtcgggcccaggactggtgaagccttcggagaccctgtccctcacctgcactgtctctggtggctccatcagtagttactcctggagctggatccggcagcccccagggaagggactggagtggattgggtatatctattacagtgggagcaccaactacaacccctccctcaagagtcgagtcaccatatcattagacacgtccaagaaccagttctccctgaagctgagctctgtgaccgctgcggacacggccgtgtattactgtgcgaggaactgggccttccactttgactactggggccagggaaccctggtcaccgtctcctca

SEQ ID NO: 364 - protein, 116 aa, artificial
  4F7 - HCVR
QVQLQESGPGLVKPSETLSLTCTVSGGSISSYSWSWIRQPPGKGLEWIGYIYYSGSTNYNPSLKSRVTISLDTSKNQFSLKLSSVTAADTAVYYCARNWAFHFDYWGQGTLVTVSS

SEQ ID NO: 365 - DNA, 360 bp, artificial
  22D1 - HCVR
caggtgcagctggtgcagtctggggctgaggtgaagaagcctggggcctcagtgagggtttcctgcaaggtttctggatacaccttcaccagctactttattcactgggtacgccaggcccctggacaagggcttgagtggatgggaataatcaaccctattagtgttagcacaagctacgcacagaagttccagggcagagtcaccatgaccagggacacgtccacgagcacagtcttcatggagctgagcagcctgagatctgaggacacggccgtgtattactgtgcgcgaggggggatacagctatggttacatttggactactggggccagggaaccctggtcaccgtctcctca

SEQ ID NO: 366 - protein, 120 aa, artificial
  22D1 - HCVR
QVQLVQSGAEVKKPGASVRVSCKVSGYTFTSYFIHWVRQAPGQGLEWMGIINPISVSTSYAQKFQGRVTMTRDTSTSTVFMELSSLRSEDTAVYYCARGGIQLWLHLDYWGQGTLVTVSS

SEQ ID NO: 367 - DNA, 360 bp, artificial
  19B5 - HCVR
caggtgcagttggtgcagtctggggctgaggtgaagaagcctggggcctcagtgaaggtttcctgcaaggtttctggatacaccttcaccagctactttattcactgggtgcgccaggcccctggacaagggcttgaatggatgggaattatcaaccctattagtgttagcacaagctacgcacagaagttccagggcagagtcaccatgaccagggacacgtccacgagcacagtcttcatggagctgagcagcctgagatctgaggacacggccgtgtattactgtgcgcgaggggggatacagctatggttacatttggactactggggccagggaaccctggtcaccgtctcctca

SEQ ID NO: 368 - protein, 120 aa, artificial
  19B5 - HCVR
QVQLVQSGAEVKKPGASVKVSCKVSGYTFTSYFIHWVRQAPGQGLEWMGIINPISVSTSYAQKFQGRVTMTRDTSTSTVFMELSSLRSEDTAVYYCARGGIQLWLHLDYWGQGTLVTVSS

SEQ ID NO: 369 - DNA, 360 bp, artificial
  25F8 - HCVR
caggtgcagctggtgcagtctggggctgaggtgaagaagcctggggcctcagtgaaggtttcctgcaaggcatctggatacaccttcaccagctactatattcactgggtgcgccaggcccctggacaaggacttgagtggatgggaataatcaaccccagtggtggtagcacaaggtacgcacagaagttccagggcagagtcaccatgaccagggacacgtccacgagcacagtcttcatggagctgagcagcctgagatctgaggacacggccgtgtattactgtgcgcgagggggaatacagctatggttacattttgactactggggccagggaaccctggtcaccgtctcctca

SEQ ID NO: 370 - protein, 120 aa, artificial
  25F8 - HCVR
QVQLVQSGAEVKKPGASVKVSCKASGYTFTSYYIHWVRQAPGQGLEWMGIINPSGGSTRYAQKFQGRVTMTRDTSTSTVFMELSSLRSEDTAVYYCARGGIQLWLHFDYWGQGTLVTVSS

SEQ ID NO: 371 - DNA, 360 bp, artificial
  26D1 - HCVR
caggtgcagttggtgcagtctggggctgaggtgaagaagcctggggcctcagtgaaggtttcctgtaaggcatctagatacaccttcaccagctactatatgtcctgggtgcgacaggcccctggacaagggcttgagtggatgggaataatccaccctagtggtggtgacacaacctacgcacagaagttccagggcagagtcaccatgaccggggacacgtccacgagcacagtctacatggagctgagcagcctgagatctgaggacacggccgtgtattactgtgcgagaggggggataaaactatggttacattttgactattggggccagggaaccctggtcaccgtctcctca

SEQ ID NO: 372 - protein, 120 aa, artificial
  26D1 - HCVR
QVQLVQSGAEVKKPGASVKVSCKASRYTFTSYYMSWVRQAPGQGLEWMGIIHPSGGDTTYAQKFQGRVTMTGDTSTSTVYMELSSLRSEDTAVYYCARGGIKLWLHFDYWGQGTLVTVSS

SEQ ID NO: 373 - DNA, 357 bp, artificial
  4D2- -HCVR
caggtgcagctggtggagtctgggggaggcgtggtccagcctgggaggtccctgagactctcctgtgcagcctctggattcaccttcagtagttatgacatgcactgggtccgccaggctccaggcaaggggctggagtgggtggcagttatatcatatgatggaactaatgaatactatgcagactccgtgaagggccgattcaccatctccagagacacttccaagaacacgctgtatttgcaaatgaacagcctgagagctgaggacacggctgtatattactgtgcgagagaacgatattttgactggtcttttgactactggggccagggaaccctggtcagtgtctcctca

SEQ ID NO: 374 - protein, 119 aa, artificial; identical to SEQ ID NO: 346
  4D2- -HCVR

SEQ ID NO: 375 - DNA, 357 bp, artificial
  4E10 - HCVR
caggtgcagctggtggagtctgggggaggcgtggtccagcctgggaggtccctgagactctcctgtgcagcgtctggattcaccttcagtagctatgacatgcactgggtccgccaggctccaggcaaggggctggagtgggtggcagttatatggtatgatggaagtaataaatactatgcagactccgtgaagggccgattcaccatctccagagacaattccacgaacacgctgcatctgcaaatgaacagcccgagagccgaggacacggctgtgtactactgtgcgagagagtataggtacagctggtactttgactactggggccagggaaccctggtcaccgtctcctca

SEQ ID NO: 376 - protein, 119 aa, artificial
  4E10 - HCVR
QVQLVESGGGVVQPGRSLRLSCAASGFTFSSYDMHWVRQAPGKGLEWVAVIWYDGSNKYYADSVKGRFTISRDNSTNTLHLQMNSPRAEDTAVYYCAREYRYSWYFDYWGQGTLVTVSS

SEQ ID NO: 377 - DNA, 363 bp, artificial
  22G10 - HCVR
gaggtgcaactgttggagtctgggggaggcttggtacagcctggggggtccctgagactctcctgtgcagcctctggattcacctttagcagttatgccatgaactgggtccgccaggctccagggaaggggctggagtgggtctcaactattagtggtggtggtgctaacacatactacgcagactccgtgaagggccggttcaccatctccagtgacaattccaagagcacgctgtatctgcaaatgaacagcctgagagccgcggacacggccgtatatcactgtgcgaaagggggaatggggggatactactacggtatggacgtctggggccaagggaccacggtcaccgtctcctca

SEQ ID NO: 378 - protein, 121 aa, artificial
  22G10 - HCVR
EVQLLESGGGLVQPGGSLRLSCAASGFTFSSYAMNWVRQAPGKGLEWVSTISGGGANTYYADSVKGRFTISSDNSKSTLYLQMNSLRAADTAVYHCAKGGMGGYYYGMDVWGQGTTVTVSS

SEQ ID NO: 379 - DNA, 375 bp, artificial; identical to SEQ ID NO: 351
  2C12_LC#1 - HCVR

SEQ ID NO: 380 - protein, 125 aa, artificial; identical to SEQ ID NO: 352
  2C12_LC#1 - HCVR

SEQ ID NO: 381 - DNA, 375 bp, artificial
  2H12_LC#2 - HCVR
caggtgcagctggtggagtctgggggaggcgtggtccagcctgggaggtccctgagactctcctgtgcagcgtctggattcaccttcagtagctatggcatgcactgggtccgccaggctccaggcaaggggctggagtgggtggcagttatatggtatgatggaagtaataaatactatacagactccgtgaagggccgattcaccatctccagagacaattccaagaacacgctgtatctgcaaatgaatagcctgagagctgaggacacggctgtgtattactgtgcgagaagggccggtataataggaactacaggctactactacggtatggacgtctggggccaagggaccacggtcaccgtctcctca

SEQ ID NO: 382 - protein, 125 aa, artificial
  2H12_LC#2 - HCVR
QVQLVESGGGVVQPGRSLRLSCAASGFTFSSYGMHWVRQAPGKGLEWVAVIWYDGSNKYYTDSVKGRFTISRDNSKNTLYLQMNSLRAEDTAVYYCARRAGIIGTTGYYYGMDVWGQGTTVTVSS

SEQ ID NO: 383 - DNA, 375 bp, artificial
  2G6_LC#1 - HCVR
caggtgcagttggtggagtctgggggaggcgtggtccagcctgggaggtccctgagactctcctgtgcagcgtctggattcaccttcagtagctatggcatgcactgggtccgccaggctccaggcaaggggctggagtgggtggcatttatatggtatgatggaagtaataaatactatgcagactccgtgaaggaccgattcaccatctccagagacaattccaagaacacgctgtatctgcaaatgaaaagcctgagagctgaggacacggctgtgtattactgtgcgagaagggccggtataataggaactataggctactactacggtatggacgtctggggccaagggaccacggtcaccgtctcctca

SEQ ID NO: 384 - protein, 125 aa, artificial
  2G6_LC#1 - HCVR
QVQLVESGGGVVQPGRSLRLSCAASGFTFSSYGMHWVRQAPGKGLEWVAFIWYDGSNKYYADSVKDRFTISRDNSKNTLYLQMKSLRAEDTAVYYCARRAGIIGTIGYYYGMDVWGQGTTVTVSS

SEQ ID NO: 385 - DNA, 375 bp, artificial; identical to SEQ ID NO: 381
  2H12 - HCVR

SEQ ID NO: 386 - protein, 125 aa, artificial; identical to SEQ ID NO: 382
  2H12 - HCVR

SEQ ID NO: 387 - DNA, 375 bp, artificial; identical to SEQ ID NO: 383
  2G6 - HCVR

SEQ ID NO: 388 - protein, 125 aa, artificial; identical to SEQ ID NO: 384
  2G6 - HCVR

SEQ ID NO: 389 - DNA, 375 bp, artificial
  23A10 - HCVR
caggtgcagctggtggagtctgggggaggcgtggtccagcctgggaggtccctgagactctcctgtgcagcgtctggattcaccttcagtcgctatggcatacactgggtccgccaggctccaggcaaggggctggagtgggtggcagttatatggtatgatggaagtaataaatactatgcagactccgtgaagggccgattcaccatctccagagacaattccaagaacacgctgtatctgctaatgaacagcctgagagccgaggactcggctgtgtattactgtgcgagaagggccggtatacctggaactacgggctactactatggtatggacgtctggggccaagggaccacggtcaccgtctcctca

SEQ ID NO: 390 - protein, 125 aa, artificial
  23A10 - HCVR
QVQLVESGGGVVQPGRSLRLSCAASGFTFSRYGIHWVRQAPGKGLEWVAVIWYDGSNKYYADSVKGRFTISRDNSKNTLYLLMNSLRAEDSAVYYCARRAGIPGTTGYYYGMDVWGQGTTVTVSS

SEQ ID NO: 391 - DNA, 369 bp, artificial
  5E3 - HCVR
gaggtgcagttggtggagtctgggggaggcctggtcaagcctggggggtccctgagactctcctgtgcagcctctggattcaccttcagtagctatagcatgcactgggtccgccaggctccagggaaggggctggagtgggtctcatccattagtagtagtagtagttacatatactacgcagactcagtgaagggccgattcaccatctccagagacaacgccaagaactcactgtatctgcaaatgaacagcctgagagccgaggacacggctgtgtattactgtgcgagaggggaaactggaactaactactactactacggtatggacgtctggggccaagggaccacggtcaccgtctcctca

SEQ ID NO: 392 - protein, 123 aa, artificial
  5E3 - HCVR
EVQLVESGGGLVKPGGSLRLSCAASGFTFSSYSMHWVRQAPGKGLEWVSSISSSSSYIYYADSVKGRFTISRDNAKNSLYLQMNSLRAEDTAVYYCARGETGTNYYYYGMDVWGQGTTVTVSS

SEQ ID NO: 393 - DNA, 327 bp, artificial
  17H8, 23B6, 28D10 -LCVR
gacattgtattgacgcagtctccaggcaccctgtctttgtctccaggggaaagagccaccctctcctgcagggccagtcagagtgttgccggcagctacctagcctggtaccagcagaaacctggccaggctcccaggctcctcatctctggtgcatccagcagggccactggcatcccagacaggttcagtggcagtgggtctgggacagacttcactctcaccatcagcagactggagcctgaagattttgcagtgtattactgtcagcagtatggtaaatcaccgatcaccttcggccaagggacacgactggagatgaaagga

SEQ ID NO: 394 - protein, 109 aa, artificial
  17H8, 23B6, 28D10 -LCVR
DIVLTQSPGTLSLSPGERATLSCRASQSVAGSYLAWYQQKPGQAPRLLISGASSRATGIPDRFSGSGSGTDFTLTISRLEPEDFAVYYCQQYGKSPITFGQGTRLEMKG

SEQ ID NO: 395 - DNA, 324 bp, artificial
  4A2, 5B4, 5C5 - LCVR
gaaattgtgttgacgcagtctccaggcaccctgtctttgtctccaggggaaagagccaccctctcttgcagggccagtcggaatattagcagcagctacttagcctggtaccagcagaaacctggccaggctcccaggctcctcatctatggtccatccagcagggccactggcatcccagacaggttcagtggcagtgggtctgggacagacttcactctcaccatcagcagactggagcctgaagattttacagtgtattactgtcagcagtatggtagctcattcactttcggccctgggaccaaagtggatatcaaacga

SEQ ID NO: 396 - protein, 108 aa, artificial
  4A2, 5B4, 5C5 - LCVR
EIVLTQSPGTLSLSPGERATLSCRASRNISSSYLAWYQQKPGQAPRLLIYGPSSRATGIPDRFSGSGSGTDFTLTISRLEPEDFTVYYCQQYGSSFTFGPGTKVDIKR

SEQ ID NO: 397 - DNA, 333 bp, artificial
  16H2, 20D3, 23E7 - LCVR
cagtctgcgctgactcagccaccctcagcgactgggacccccgggcagagggtcaccatctcttgttctggaagcagctccaacatcggaagtaattttgtaaactggtacaaacaactcccaggaacggcccccaaagtcctcatctatactaataatcagcggccctcaggggtccctgaccgattctctggctccaagtctggcacctcagcctccctggccatcagtgggctccagtctgaggatgagtctgattattactgtgcaacatgggatgacagcctgaatggttgggtgttcggcggagggaccaagctgaccgtcctaggt

SEQ ID NO: 398 - protein, 111 aa, artificial
  16H2, 20D3, 23E7 - LCVR
QSALTQPPSATGTPGQRVTISCSGSSSNIGSNFVNWYKQLPGTAPKVLIYTNNQRPSGVPDRFSGSKSGTSASLAISGLQSEDESDYYCATWDDSLNGWVFGGGTKLTVLG

SEQ ID NO: 399 - DNA, 333 bp, artificial
  26F12, 27B3 - LCVR
cagtctgtgctgactcagtcaccctcagcgtctgggacccccgggcagaaggtcaccatctcttgttctggaagccgctccaacatcggaagtaattttgtaaactggtaccagcagctcccaggaacggcccccaaactcctcatctatactaattatcagcggccctcaggggtccctgaccgattctctggctccaagtctggcacctcagcctccctggccatcagtgggctccagtctgaggatgaggctgattattactgtgcagtatgggatgacagcctgaatggttgggtgttcggcggagggaccaagctgaccgtcctaggt

SEQ ID NO: 400 - protein, 111 aa, artificial
  26F12, 27B3 - LCVR
QSVLTQSPSASGTPGQKVTISCSGSRSNIGSNFVNWYQQLPGTAPKLLIYTNYQRPSGVPDRFSGSKSGTSASLAISGLQSEDEADYYCAVWDDSLNGWVFGGGTKLTVLG

SEQ ID NO: 401 - DNA, 324 bp, artificial
  4B10, 4C2 - LCVR
gaaattgtattgacgcagtctccaggcaccctgtctttgtctccaggggaaagagccaccctctcctgcagggccagtcagagtgttagcaacacctacttagcctggtaccatcagagacctggccaggctcccaggctcctcatctatggtgcatccagcagggccactggcatcccagacagattcagtggcagtgggtctgggacagacttcgctctcaccatcagcagtctggagcctgaagattttgcagtgtattactgtcagcagtacagtaactcgtggacgttcggccaagggaccaaggtggaaatcaaacga

SEQ ID NO: 402 - protein, 108 aa, artificial
  4B10, 4C2 - LCVR
EIVLTQSPGTLSLSPGERATLSCRASQSVSNTYLAWYHQRPGQAPRLLIYGASSRATGIPDRFSGSGSGTDFALTISSLEPEDFAVYYCQQYSNSWTFGQGTKVEIKR

SEQ ID NO: 403 - DNA, 324 bp, artificial
  4D3, 4F3 - LCVR
gaaattgtgttgacgcagtctccaggcaccctgtctttgtctccaggggaaagagccaccctctcctgcagggccagtcagagtgttagcagcagctacttagcctggtaccagcagaaacctggccaggctcccaggctcctcatctatggtgcatccagcagggccactggcatcccagacaggttcagtggcagtgggtctgggacagacttcactctcaccatcagcagactggaacctgaggattttgcagtgtattactgtcagcagtatggtagctcgtggacgttcggccaagggaccaaggtggaaatcaaacga

SEQ ID NO: 404 - protein, 108 aa, artificial
  4D3, 4F3 - LCVR
EIVLTQSPGTLSLSPGERATLSCRASQSVSSSYLAWYQQKPGQAPRLLIYGASSRATGIPDRFSGSGSGTDFTLTISRLEPEDFAVYYCQQYGSSWTFGQGTKVEIKR

SEQ ID NO: 405 - DNA, 324 bp, artificial
  16E2, 17E10, 20B12 - LCVR
gacatccagatgacccagtctccatcctcactgtctgcatctgtaggagacagagtcaccatcacttgtcgggcgagtcagggcattagcaattatttagcctggttacagcagaaaccagggaaagcccctaagtccctgatctatgctgcatccagtttgcaaagtggggtcccatcaaagttcagcggcagtggatctgggacagatttcactctcaccatcagcagcctgcagcctgaagattttgcaacttattactgccaacactattttacttaccctcggacgttcggccaagggaccaaggtggaaatcaaacga

SEQ ID NO: 406 - protein, 108 aa, artificial
  16E2, 17E10, 20B12 - LCVR
DIQMTQSPSSLSASVGDRVTITCRASQGISNYLAWLQQKPGKAPKSLIYAASSLQSGVPSKFSGSGSGTDFTLTISSLQPEDFATYYCQHYFTYPRTFGQGTKVEIKR

SEQ ID NO: 407 - DNA, 321 bp, artificial
  1D10, 2C12 - LCVR
tcctatgcgctgactcagccaccctcagtgtccgtgtccccaggacagacagccagcctcacctgctctggagatagattgggggaaaaatatacttgctggtatcagcagaggccaggccagtcccctttgctggtcatctatcaagataccaagcggccctcagggatccctgagcgattctctggctccacctctggtaacacagccactctgaccatcagcgggacccaggctatggatgaggctgactattactgtcaggcgtgggacagcagcactgtggtattcggcggagggaccaagctgaccgtcctaggt

SEQ ID NO: 408 - protein, 107 aa, artificial
  1D10, 2C12 - LCVR
SYALTQPPSVSVSPGQTASLTCSGDRLGEKYTCWYQQRPGQSPLLVIYQDTKRPSGIPERFSGSTSGNTATLTISGTQAMDEADYYCQAWDSSTVVFGGGTKLTVLG

SEQ ID NO: 409 - DNA, 327 bp, artificial
  16C1 - LCVR
gaaattgtgttgacgcagtctccaggcaccctgtctttgtctccaggggaaagagccaccctctcctgcagggccagccagagtgttagcagcagctacttagcctggtaccagcagaaacctggccaggctcccaggctcctcatctttggtgcatccagcagggccactggcatcccagacaggttcagtggcagtgggtctgggacagacttcactctcaccatcagcggactggagcctgaagattttgcagtgtatcactgtcagcagtatggtaactcaccgctcactttcggcggagggaccaaggtggagatcaaacga

SEQ ID NO: 410 - protein, 109 aa, artificial
  16C1 - LCVR
EIVLTQSPGTLSLSPGERATLSCRASQSVSSSYLAWYQQKPGQAPRLLIFGASSRATGIPDRFSGSGSGTDFTLTISGLEPEDFAVYHCQQYGNSPLTFGGGTKVEIKR

SEQ ID NO: 411 - DNA, 327 bp, artificial
  25G10 - LCVR
gaaattgtgttgacgcagtctccaggcaccctgtctttgtctccaggggaaagagccaccctctcctgcagggccagtcagagtgttagcagcagctacttagcctggtaccagcagaaacctggccaggctcccaggctcctcatctttggtgcatccagcagggccactggcatcccagacaggttcagtggcagtgggtctgggacagacttcactctcaccatcagcagactggagcctgaagattttgcagtgtatcactgtcagcagtatggtaactcaccgctcactttcggcggagggaccaaggtggagatcaaacga

SEQ ID NO: 412 - protein, 109 aa, artificial
  25G10
EIVLTQSPGTLSLSPGERATLSCRASQSVSSSYLAWYQQKPGQAPRLLIFGASSRATGIPDRFSGSGSGTDFTLTISRLEPEDFAVYHCQQYGNSPLTFGGGTKVEIKR

SEQ ID NO: 413 - DNA, 327 bp, artificial
  16A4 - LCVR
gaaattgtgttgacgcagtctccaggcaccctgtctttgtctccaggggaaagagccaccctctcctgcagggccagtcagagtgttagcagcagttatttagcctggtaccagcagaaacctggccaggctcccaggctcctcatctatggtacatccagcagggccactggcatcccagacaggttcagtggcagtgggtctgggacagacttcactctcaccatcagcagactggagcctgaagattttgcagtgtattattgtcagcagtacggtagctcacctttcactttcggcggagggaccaaggtggagatcaaacga

SEQ ID NO: 414 - protein, 109 aa, artificial
  16A4 - LCVR
EIVLTQSPGTLSLSPGERATLSCRASQSVSSSYLAWYQQKPGQAPRLLIYGTSSRATGIPDRFSGSGSGTDFTLTISRLEPEDFAVYYCQQYGSSPFTFGGGTKVEIKR

SEQ ID NO: 415 - DNA, 324 bp, artificial
  1F10 - LCVR
gaaattgtgttgacgcagtctccaggcaccctgtctttgtctccaggggaaagagccaccctctcctgcagggccagtcggagtattagcagcagctacttagcctggtaccagcagaaacctggccaggctcccaggctcctcatctatggtccatccagcagggccactggcatcccagacaggttcagtggcagtgggtctgggacagacttcactctcaccatcagcagactggagcctgaagattttgcagtgtattactgtcagcagtatggtagctcattcactttcggccctgggaccaaagtggatatcaaacga

SEQ ID NO: 416 - protein, 108 aa, artificial
  1F10 - LCVR
EIVLTQSPGTLSLSPGERATLSCRASRSISSSYLAWYQQKPGQAPRLLIYGPSSRATGIPDRFSGSGSGTDFTLTISRLEPEDFAVYYCQQYGSSFTFGPGTKVDIKR

SEQ ID NO: 417 - DNA, 336 bp, artificial
  4A9 - LCVR
cagtctgtgctgacgcagccgccctcagtgtctggggccccaggacagagggtcaccatctcctgcactgggagcagctccaacatcgggacaggttatgctgtacactggtaccagcagtttccaggaacagcccccaaactcctcatctatggtaacaacaatcggccctcaggggttcctgaccgattctctggctccaagtctggcacctcagcctccctggccatcactgggctccaggctgaggatgaggctgattattactgccagtcctatgacagcagactgagtggttgggtgttcggcggagggaccaagctgaccgtcctaggt

SEQ ID NO: 418 - protein, 112 aa, artificial
  4A9 - LCVR
QSVLTQPPSVSGAPGQRVTISCTGSSSNIGTGYAVHWYQQFPGTAPKLLIYGNNNRPSGVPDRFSGSKSGTSASLAITGLQAEDEADYYCQSYDSRLSGWVFGGGTKLTVLG

SEQ ID NO: 419 - DNA, 336 bp, artificial
  4F7 - LCVR
cagtctgtgctgacgcagccgccctcagtgtctggggccccagggcagagggtcaccatctcctgcactgggagcagctccaatatcgggacaggttatgatgtacactggtatcagcagcttccaggaacagcccccaaactcctcatccatggtaacagcaatcggccctcaggggtccctgaccgattctctggctccaagtctggcacctcagcctccctggccatcactgggctccaggctgaggatgaggctgattattactgccagtcctatgacagcagtctgagtggttgggtgttcggcggagggaccaggttgaccgtcctaggt

SEQ ID NO: 420 - protein, 112 aa, artificial
  4F7 - LCVR
QSVLTQPPSVSGAPGQRVTISCTGSSSNIGTGYDVHWYQQLPGTAPKLLIHGNSNRPSGVPDRFSGSKSGTSASLAITGLQAEDEADYYCQSYDSSLSGWVFGGGTRLTVLG

SEQ ID NO: 421 - DNA, 333 bp, artificial
  22D1 - LCVR
cagtctgcgctgactcagccaccctcagcgactgggacccccgggcagagggtcaccatctcttgttctggaagcagctccaacatcggaagcaattttgtaaactggtacaagcagctcccaggaacggcccccaaagtcctcatctatactaataatcagcggccctcaggggtccctgaccgattctctggctccaagtctggcacctcagcctccctggccatcagtgggctccagtctgaggatgagtctgattattactgtgcaacatgggatgacagtatgaatggttgggtgttcggcggagggaccaagctgaccgtcctaggt

SEQ ID NO: 422 - protein, 111 aa, artificial
  22D1 - LCVR
QSALTQPPSATGTPGQRVTISCSGSSSNIGSNFVNWYKQLPGTAPKVLIYTNNQRPSGVPDRFSGSKSGTSASLAISGLQSEDESDYYCATWDDSMNGWVFGGGTKLTVLG

SEQ ID NO: 423 - DNA, 333 bp, artificial
  19B5 - LCVR
cagtctgcgctgactcagccaccctcaacgactgggacccccgggcagagggtcaccatctcttgttctggaagcaggtccaacatcggaagcaattttgtaaactggtacaagcagctcccaggaacggcccccaaagtcctcatctatactaataatcagcggccctcaggggtccctgaccgattctctggctccaagtctggcacctcagcctccctggccatcagtgggctccagtctgaggatgagtctgattattactgcgcaacatgggatgacagtatgaatggttgggtgttcggcggagggaccaaactgaccgtcctaggt

SEQ ID NO: 424 - protein, 111 aa, artificial
  19B5 - LCVR
QSALTQPPSTTGTPGQRVTISCSGSRSNIGSNFVNWYKQLPGTAPKVLIYTNNQRPSGVPDRFSGSKSGTSASLAISGLQSEDESDYYCATWDDSMNGWVFGGGTKLTVLG

SEQ ID NO: 425 - DNA, 333 bp, artificial
  25F8 - LCVR
cagtctgcgctgactcagccaccctcagcgactgggacccccgggcagagggtcaccatctcttgttctggaagcagctccaacatcggaaggaattttgtaaactggtataagcagctcccaggaacggcccccaaagtcctcatttatactaataatcagcggccctcaggggtccctgaccgattctctggctccaagtctggcacctcagcctccctggccatcagtgggctccagtctgaggatgagtctgattattactgtgcagcatgggatgacagcctgaatggttgggtgttcggcggagggaccaagctgaccgtcctaggt

SEQ ID NO: 426 - protein, 111 aa, artificial
  25F8 - LCVR
QSALTQPPSATGTPGQRVTISCSGSSSNIGRNFVNWYKQLPGTAPKVLIYTNNQRPSGVPDRFSGSKSGTSASLAISGLQSEDESDYYCAAWDDSLNGWVFGGGTKLTVLG

SEQ ID NO: 427 - DNA, 333 bp, artificial
  26D1 - LCVR
cactctgtgctgactcagtcaccctcagcgtctgggacccccggacagagggtcaccatctcttgttctggaagccgctccaacatcggaagtaattttgtaaactggtaccagcagctcccaggaacggcccccaaactcctcatctatactaataatcagcggccctcaggggtccctgaccgattctctggctccaagtctggcacctcagcctccctggccatcagtgggctccagtctgaggatgaggctgattattactgtgcagtatgggatgacagcctgaatggttgggtgttcggcggagggaccaagctgaccgtcctaggt

SEQ ID NO: 428 - protein, 111 aa, artificial
  26D1 - LCVR
HSVLTQSPSASGTPGQRVTISCSGSRSNIGSNFVNWYQQLPGTAPKLLIYTNNQRPSGVPDRFSGSKSGTSASLAISGLQSEDEADYYCAVWDDSLNGWVFGGGTKLTVLG

SEQ ID NO: 429 - DNA, 324 bp, artificial
  4D2 - LCVR
gaaattgtattgacgcagtctccaggcaccctgtctttgtctccaggggaaagagccaccctctcctgcagggccagtcagagtgttagcaacacctacttagcctggtaccatcagagacctggccaggctcccaggctcctcatctatggtgcatccagcagggccgctggcatcccagacaggttcagtggcagtgggtctgggacagacttcactctcaccatcagcagactggagcctgaagattttgcagtgtattactgtcagcagtatagtaactcgtggacgttcggccaagggaccaaggtggaaatcaaacga

SEQ ID NO: 430 - protein, 108 aa, artificial
  4D2 - LCVR
EIVLTQSPGTLSLSPGERATLSCRASQSVSNTYLAWYHQRPGQAPRLLIYGASSRAAGIPDRFSGSGSGTDFTLTISRLEPEDFAVYYCQQYSNSWTFGQGTKVEIKR

SEQ ID NO: 431 - DNA, 324 bp, artificial
  4E10 - LCVR
gaaattgtgttgacgcagtctccaggcaccctgtctttgtctccaggggaaagagccaccctctcctgcagggccagtcagagtgttggcagcagctacttagcctggtaccagcagaaacctggccaggctcccaggctcctcatctatggtgcatccagcagggtcactggcatcccagacaggttcagtggcagtgggtctgggacagatttcactctcaccatcagcagactggagcctgaagattttgcagtgtattactgtcagcaatatagtaactcgtggacgttcggccaagggaccaaggtggaaatcaaacga

SEQ ID NO: 432 - protein, 108 aa, artificial
  4E10 - LCVR
EIVLTQSPGTLSLSPGERATLSCRASQSVGSSYLAWYQQKPGQAPRLLIYGASSRVTGIPDRFSGSGSGTDFTLTISRLEPEDFAVYYCQQYSNSWTFGQGTKVEIKR

SEQ ID NO: 433 - DNA, 324 bp, artificial
  22G10 - LCVR
gaaatagtgatgacgcagtctccagtcaccctgtctctgtctctaggggaaagagccaccctctcctgcagggccagtcagagtattagcagcaacttagcctggttccagcagaaacctggccaggctcccagactcctcatctatggtgcatttaccagggccactggtatcccagccagggtcagtggcagtgggtctgggacagagttcactctcaccatcagcagcctgcagtctgaagattttgcagtttattactgtcagcagtataattactggccgctcactttcggcggagggaccaaggtggagatcaagcga

SEQ ID NO: 434 - protein, 108 aa, artificial
  22G10 - LCVR
EIVMTQSPVTLSLSLGERATLSCRASQSISSNLAWFQQKPGQAPRLLIYGAFTRATGIPARVSGSGSGTEFTLTISSLQSEDFAVYYCQQYNYWPLTFGGGTKVEIKR

SEQ ID NO: 435 - DNA, 339 bp, artificial
  2C12_LC#1 - LCVR
gatgttgtgatgactcagtctccactctccctgcccgtcacccttggacagccggcctccatctcctgcaggtctagtcaaagcctcgtatacagtgatggaaacacctacttgaattggtttcagcagaggccaggccaatctccaaggcgcctaatttataaggtttctaactgggactctggggtcccagacagattcagcggcagtgggtcaggcactgatttcacactgaaaatcagcagggtggaggctgaggatgttggggtttattactgcatgcaaggtatagtgtggccgtgcagttttggccaggggaccaagctggagatcaaacga

SEQ ID NO: 436 - protein, 113 aa, artificial
  2C12_LC#1 - LCVR
DVVMTQSPLSLPVTLGQPASISCRSSQSLVYSDGNTYLNWFQQRPGQSPRRLIYKVSNWDSGVPDRFSGSGSGTDFTLKISRVEAEDVGVYYCMQGIVWPCSFGQGTKLEIKR

SEQ ID NO: 437 - DNA, 339 bp, artificial
  2H12_LC#2 - LCVR
gatgttgtgatgactcagtctccactctccctgcccgtcacccttggacagccggcctccatctcctgcaggtctagtcaaagcctcgtatacagtgatggaaacacctacttgaattggtttcagcagaggccaggccaatctccaaggcgcctaatttataaggtttctaactgggactctggggtcccagacagaatcagcggcagtgggtcaggcaccgatttcacactgaaaatcagcagggtggaggctgaggatgttggggtttattactgcatgcaagatacactgtggccgtgcagttttggccaggggaccaagctggagatcaaacga

SEQ ID NO: 438 - protein, 113 aa, artificial
  2H12_LC#2 - LCVR
DVVMTQSPLSLPVTLGQPASISCRSSQSLVYSDGNTYLNWFQQRPGQSPRRLIYKVSNWDSGVPDRISGSGSGTDFTLKISRVEAEDVGVYYCMQDTLWPCSFGQGTKLEIKR

SEQ ID NO: 439 - DNA, 339 bp, artificial
  2G6_LC#1 - LCVR
gatgttgtgatgactcagtctccactctccctgcccgtcacccttggacagccggcctccatctcctgcaggtctagtcaaagcctcgtatacagtgatggaaacacctacttgaattggtttcagcagaggccaggccaatctccacggcgcctaatttatcaggtttctaactgggactctggggtcccagacagattcagcggcagtgggtcaggcactgatttcacactgaaaatcagcagggtggaggctgaggatgttgggatttattactgcatgcaagatacactgtggccgtgcagttttggccaggggaccaagctggagatcaaacga

SEQ ID NO: 440 - protein, 113 aa, artificial
  2G6_LC#1 - LCVR
DVVMTQSPLSLPVTLGQPASISCRSSQSLVYSDGNTYLNWFQQRPGQSPRRLIYQVSNWDSGVPDRFSGSGSGTDFTLKISRVEAEDVGIYYCMQDTLWPCSFGQGTKLEIKR

SEQ ID NO: 441 - DNA, 321 bp, artificial
  2H12 - LCVR
tcctatgagctgactcagccaccctcagtgtccgtgtccccaggacagacagccagcatcacctgctctggagatagattgggggaaaaatatacttgctggtatcagcagaggccaggccagtcccctttgctggtcatctatcaagataccaagcggccctcagggatccctgagcgattctctggctccaactctggtaacacagccactctgaccatcagcgggacccagcctatggatgaggctgactattactgtcaggcgtgggacagcagcactgtggtattcggcggagggaccaagctgaccgtcctaggt

SEQ ID NO: 442 - protein, 107 aa, artificial
  2H12 - LCVR
SYELTQPPSVSVSPGQTASITCSGDRLGEKYTCWYQQRPGQSPLLVIYQDTKRPSGIPERFSGSNSGNTATLTISGTQPMDEADYYCQAWDSSTVVFGGGTKLTVLG

SEQ ID NO: 443 - DNA, 321 bp, artificial
  2G6 - LCVR
tcctatgaactgactcagccaccctcagtgtccgtgtccccaggacagacagccagcatcacctgctctggagataggttgggggaaaaatatacttgctggtatcagcagaggccaggccagtcccctttgctggtcatctatcaagataccaagcggccctcagggatccctgagcgattctctggctccaactctggtaacacagccactctgaccatcagcgggacccaggctatggatgaggctgactattactgtcaggcgtgggacagcagcactgtggtattcggcggagggaccaagctgaccgtcctaggt

SEQ ID NO: 444 - protein, 107 aa, artificial
  2G6 - LCVR
SYELTQPPSVSVSPGQTASITCSGDRLGEKYTCWYQQRPGQSPLLVIYQDTKRPSGIPERFSGSNSGNTATLTISGTQAMDEADYYCQAWDSSTVVFGGGTKLTVLG

SEQ ID NO: 445 - DNA, 321 bp, artificial
  23A10 - LCVR
tcctatgagctgactcagccaccctcagtgtccgtgtccccaggacagacagccagcatcacctgctctggagatagattgggggagaaatatgtttgctggtatcagcagaagccaggccagtcccctatactggtcatctatcaagataataagtggccctcagggatccctgagcgattctctggctccaactctgggaacacagccactctgaccatcagcgggacccaggctatggatgaggctgactattactgtcaggcgtgggacagcagcactgtggtattcggcggggggaccaagctgaccgtcctaggt

SEQ ID NO: 446 - protein, 107 aa, artificial
  23A10 - LCVR
SYELTQPPSVSVSPGQTASITCSGDRLGEKYVCWYQQKPGQSPILVIYQDNKWPSGIPERFSGSNSGNTATLTISGTQAMDEADYYCQAWDSSTVVFGGGTKLTVLG

SEQ ID NO: 447 - DNA, 321 bp, artificial
  5E3 - LCVR
tcctatgagctgactcagccaccctcagtgtccgtgtccccaggacagacagccagcatcacctgctctggagataaattgggggatgaatatgcttgctggtatcagcagaagccaggccagtcccctgtgctggtcatctatcaagatagcaagcggccctcagggatccctgagcgattctctggctccaactctgggaacacagccactctgaccatcagcgggacccaggctatggatgaggctgactattactgtcaggcgtgggacagcagcactgtggtattcggcggagggaccaagctgaccgtcctaggt

SEQ ID NO: 448 - protein, 107 aa, artificial
  5E3 - LCVR
SYELTQPPSVSVSPGQTASITCSGDKLGDEYACWYQQKPGQSPVLVIYQDSKRPSGIPERFSGSNSGNTATLTISGTQAMDEADYYCQAWDSSTVVFGGGTKLTVLG

SEQ ID NO: 449 - protein, 119 aa, artificial; identical to SEQ ID NO: 348
  4F3 VH

SEQ ID NO: 450 - protein, 116 aa, artificial; identical to SEQ ID NO: 362
  4A9 VH

SEQ ID NO: 451 - protein, 119 aa, artificial; identical to SEQ ID NO: 346
  4B10 VH

SEQ ID NO: 452 - protein, 122 aa, artificial; identical to SEQ ID NO: 338
  17H8.2 VH

SEQ ID NO: 453 - protein, 120 aa, artificial; identical to SEQ ID NO: 354
  16C1.1 VH

SEQ ID NO: 454 - protein, 125 aa, artificial; identical to SEQ ID NO: 358
  16A4.1 VH

SEQ ID NO: 455 - protein, 121 aa, artificial; identical to SEQ ID NO: 378
  22G10.1 VH

SEQ ID NO: 456 - protein, 120 aa, artificial; identical to SEQ ID NO: 342
  20D3.1 VH

SEQ ID NO: 457 - protein, 120 aa, artificial; identical to SEQ ID NO: 366
  22D1.1 VH

SEQ ID NO: 458 - protein, 120 aa, artificial; identical to SEQ ID NO: 370
  25F8.1 VH

SEQ ID NO: 459 - protein, 120 aa, artificial; identical to SEQ ID NO: 344
  26F12.1 VH

SEQ ID NO: 460 - protein, 120 aa, artificial; identical to SEQ ID NO: 372
  26D1.1 VH

SEQ ID NO: 461 - protein, 120 aa, artificial
  25G10.1 VH
QVQLQESGPGLVKPSETLSLTCTVSGGSISGYYWSWIRQPPGKGLEWIGYIYYIGSTNYNPSLKSRVTMSVDTSKNQFSLKLSSVTAADTAVYYCARDGSSGWYRWFDPWGQGTLVTVSS

SEQ ID NO: 462 - protein, 120 aa, artificial; identical to SEQ ID NO: 368
  19B5.1 VH

SEQ ID NO: 463 - protein, 120 aa, artificial; identical to SEQ ID NO: 340
  4A2 VH

SEQ ID NO: 464 - protein, 120 aa, artificial
  4A2 (1-472)(Q17E,H47P) VH
QVQLQESGPGLVKPSETLSLTCTVSGGSISSSGYYWSWIRQPPGKGLEWIGYIYYTGSAYYNPSLKSRVTISVDTSKNQFSLKLSSVTAADTAVYYCARDGSSGWYFQYWGQGTLVTVSS

SEQ ID NO: 465 - protein, 120 aa, artificial; identical to SEQ ID NO: 340
  4A2 VH

SEQ ID NO: 466 - protein, 120 aa, artificial; identical to SEQ ID NO: 464
  4A2 (1-472)(Q17E,H47P) VH

SEQ ID NO: 467 - protein, 120 aa, artificial; identical to SEQ ID NO: 464
  4A2 (1-472)(Q17E,H47P,D111E) VH

SEQ ID NO: 468 - protein, 120 aa, artificial; identical to SEQ ID NO: 464
  4A2 (1-472)(Q17E,H47P,D111E,W134Y) VH

SEQ ID NO: 469 - protein, 120 aa, artificial; identical to SEQ ID NO: 464
  4A2 VH

SEQ ID NO: 470 - protein, 120 aa, artificial; identical to SEQ ID NO: 464
  4F3 (1-471)(R17G) VH

SEQ ID NO: 471 - protein, 119 aa, artificial
  4F3 (1-471)(R17G,T47A) VH
QVQLVESGGGVVQPGGSLRLSCAASGFSFSSYDMDWVRQAPGKGLEWVAVIWYDGSNKYYADSVRGRFTISRDNSKNTLFLQMNSLRVEDTAVYYCARETGEGWYFDLWGRGTLVTVSS

SEQ ID NO: 472 - protein, 119 aa, artificial
  4F3 (1-471)(R17G,T47A,R141Q) VH
QVQLVESGGGVVQPGGSLRLSCAASGFSFSSYDMDWVRQAPGKGLEWVAVIWYDGSNKYYADSVRGRFTISRDNSKNTLFLQMNSLRVEDTAVYYCARETGEGWYFDLWGQGTLVTVSS

SEQ ID NO: 473 - protein, 119 aa, artificial
  4F3 (1-471)(R17G,T47A,D61E,D72E,R141Q) VH
QVQLVESGGGVVQPGGSLRLSCAASGFSFSSYDMDWVRQAPGKGLEWVAVIWYEGSNKYYAESVRGRFTISRDNSKNTLFLQMNSLRVEDTAVYYCARETGEGWYFDLWGQGTLVTVSS

SEQ ID NO: 474 - protein, 119 aa, artificial
  4F3 (1-471)(R17G,T47A,D61E,D72E,W134Y,R141Q) VH
QVQLVESGGGVVQPGGSLRLSCAASGFSFSSYDMDWVRQAPGKGLEWVAVIWYEGSNKYYAESVRGRFTISRDNSKNTLFLQMNSLRVEDTAVYYCARETGEGYYFDLWGQGTLVTVSS

SEQ ID NO: 475 - protein, 125 aa, artificial
  2G6 (1-477)(R17G,D61E,D72E,K94N) VH
QVQLVESGGGVVQPGGSLRLSCAASGFTFSSYGMHWVRQAPGKGLEWVAFIWYEGSNKYYAESVKDRFTISRDNSKNTLYLQMNSLRAEDTAVYYCARRAGIIGTIGYYYGMDVWGQGTTVTVSS

SEQ ID NO: 476 - protein, 120 aa, artificial; identical to SEQ ID NO: 354
  16C1.1 VH

SEQ ID NO: 477 - protein, 120 aa, artificial
  16C1.1 (1-469)(T92K) VH
QVQLQESGPGLVKPSETLSLTCTVSGGSISGYYWSWIRQPPGKGLEWIGYIYYIGSTNYNPSLKSRVTMSIDTSKNQFSLKLSSLTAADTAVYFCARDGSSGWYRWFDPWGQGTLVTVSS

SEQ ID NO: 478 - protein, 120 aa, artificial
  16C1.1 (1-469)(T92K,D109E) VH
QVQLQESGPGLVKPSETLSLTCTVSGGSISGYYWSWIRQPPGKGLEWIGYIYYIGSTNYNPSLKSRVTMSIDTSKNQFSLKLSSLTAADTAVYFCAREGSSGWYRWFDPWGQGTLVTVSS

SEQ ID NO: 479 - protein, 120 aa, artificial
  16C1.1 (1-469)(T92K,W132Y,W135Y) VH
QVQLQESGPGLVKPSETLSLTCTVSGGSISGYYWSWIRQPPGKGLEWIGYIYYIGSTNYNPSLKSRVTMSIDTSKNQFSLKLSSLTAADTAVYFCARDGSSGYYRYFDPWGQGTLVTVSS

SEQ ID NO: 480 - protein, 120 aa, artificial; identical to SEQ ID NO: 477
  16C1.1 (1-469)(T92K) VH

SEQ ID NO: 481 - protein, 122 aa, artificial; identical to SEQ ID NO: 338
  17H8.2 VH

SEQ ID NO: 482 - protein, 122 aa, artificial
  17H8.2 (1-471)(D109E) VH
QVQLQESGPGLVKPSETLSLTCTVSGGSINSYYWSWIRQPPGKGLEWIGYIYYIGSTNYNPSLKSRVTISVDTSKNQFSLKLSSVTAADTALYYCARESRYRSGWYDAFDIWGQGTMVTVSS

SEQ ID NO: 483 - protein, 122 aa, artificial
  17H8.2 (1-471)(D109E,W132Y) VH
QVQLQESGPGLVKPSETLSLTCTVSGGSINSYYWSWIRQPPGKGLEWIGYIYYIGSTNYNPSLKSRVTISVDTSKNQFSLKLSSVTAADTALYYCARESRYRSGYYDAFDIWGQGTMVTVSS

SEQ ID NO: 484 - protein, 122 aa, artificial; identical to SEQ ID NO: 482
  17H8.2 (1-471)(D109E) VH

SEQ ID NO: 485 - protein, 116 aa, artificial; identical to SEQ ID NO: 364
  4F7 VH

SEQ ID NO: 486 - protein, 116 aa, artificial; identical to SEQ ID NO: 364
  4F7 VH

SEQ ID NO: 487 - protein, 116 aa, artificial
  4F7 (1-468)(W113Y) VH
QVQLQESGPGLVKPSETLSLTCTVSGGSISSYSWSWIRQPPGKGLEWIGYIYYSGSTNYNPSLKSRVTISLDTSKNQFSLKLSSVTAADTAVYYCARNYAFHFDYWGQGTLVTVSS

SEQ ID NO: 488 - protein, 119 aa, artificial
  4B10 (1-471)(R17G,D61E,D72E,W134Y) VH
QVQLVESGGGVVQPGGSLRLSCAASGFTFSSYDMHWVRQAPGKGLEWVAVISYEGTNEYYAESVKGRFTISRDTSKNTLYLQMNSLRAEDTAVYYCARERYFDYSFDYWGQGTLVSVSS

SEQ ID NO: 489 - protein, 119 aa, artificial; identical to SEQ ID NO: 346
  4B10 VH

SEQ ID NO: 490 - protein, 119 aa, artificial
  4B10 (1-471)(R17G) VH
QVQLVESGGGVVQPGGSLRLSCAASGFTFSSYDMHWVRQAPGKGLEWVAVISYDGTNEYYADSVKGRFTISRDTSKNTLYLQMNSLRAEDTAVYYCARERYFDWSFDYWGQGTLVSVSS

SEQ ID NO: 491 - protein, 119 aa, artificial
  4B10 (1-471)(R17G,D61E,D72E) VH
QVQLVESGGGVVQPGGSLRLSCAASGFTFSSYDMHWVRQAPGKGLEWVAVISYEGTNEYYAESVKGRFTISRDTSKNTLYLQMNSLRAEDTAVYYCARERYFDWSFDYWGQGTLVSVSS

SEQ ID NO: 492 - protein, 116 aa, artificial; identical to SEQ ID NO: 362
  4A9 VH

SEQ ID NO: 493 - protein, 116 aa, artificial
  4A9 (1-468)(F55I,A56G) VH
QVQLQESGPGLVKPSETLSLTCTVSGGSISGYYWSWIRQPPGKGLEWIGYFSYSGSTNYNPSLKSRVTLSVDTSKNQFSLKLSSVTAADTAVYYCARNWAFHFDFWGQGTLVTVSS

SEQ ID NO: 494 - protein, 116 aa, artificial; identical to SEQ ID NO: 493
  4A9 (1-468)(F55I,A56G) VH

SEQ ID NO: 495 - protein, 116 aa, artificial
  4A9 (1-468)(F55I,A56G,W113Y) VH
QVQLQESGPGLVKPSETLSLTCTVSGGSISGYYWSWIRQPPGKGLEWIGYFSYSGSTNYNPSLKSRVTLSVDTSKNQFSLKLSSVTAADTAVYYCARNYAFHFDFWGQGTLVTVSS

SEQ ID NO: 496 - protein, 120 aa, artificial; identical to SEQ ID NO: 342
  20D3.1 VH

SEQ ID NO: 497 - protein, 120 aa, artificial; identical to SEQ ID NO: 342
  20D3.1 VH

SEQ ID NO: 498 - protein, 120 aa, artificial
  20D3.1 (1-469)(W133Y) VH
QVQLVQSGAEVKKPGASVKVSCKVSGYTFTSYFIHWVRQAPGQGLEWMGIINPISVSTSYAQKFQGRVTMTRDTSTSTVFMELSSLRSEDTAVYYCARGGIQLYLHFDYWGQGTLVTVSS

SEQ ID NO: 499 - protein, 120 aa, artificial; identical to SEQ ID NO: 498
  20D3.1 (1-469)(W133Y) VH

SEQ ID NO: 500 - protein, 120 aa, artificial; identical to SEQ ID NO: 498
  20D3.1 (1-469)(W133Y) VH

SEQ ID NO: 501 - protein, 121 aa, artificial
  22G10.1 (1-470)(S82R,A99E) VH
EVQLLESGGGLVQPGGSLRLSCAASGFTFSSYAMNWVRQAPGKGLEWVSTISGGGANTYYADSVKGRFTISRDNSKSTLYLQMNSLRAEDTAVYHCAKGGMGGYYYGMDVWGQGTTVTVSS

SEQ ID NO: 502 - protein, 121 aa, artificial; identical to SEQ ID NO: 501
  22G10.1 (1-470)(A99E,H105Y) VH

SEQ ID NO: 503 - protein, 121 aa, artificial
  22G10.1 (1-470)(A99E) VH
EVQLLESGGGLVQPGGSLRLSCAASGFTFSSYAMNWVRQAPGKGLEWVSTISGGGANTYYADSVKGRFTISSDNSKSTLYLQMNSLRAEDTAVYHCAKGGMGGYYYGMDVWGQGTTVTVSS

SEQ ID NO: 504 - protein, 121 aa, artificial; identical to SEQ ID NO: 503
  22G10.1 (1-470)(A99E) VH

SEQ ID NO: 505 - protein, 121 aa, artificial
  22G10.1 (1-470)(D72E,A99E) VH
EVQLLESGGGLVQPGGSLRLSCAASGFTFSSYAMNWVRQAPGKGLEWVSTISGGGANTYYAESVKGRFTISSDNSKSTLYLQMNSLRAEDTAVYHCAKGGMGGYYYGMDVWGQGTTVTVSS

SEQ ID NO: 506 - protein, 121 aa, artificial
  22G10.1 (1-470)(H105Y) VH
EVQLLESGGGLVQPGGSLRLSCAASGFTFSSYAMNWVRQAPGKGLEWVSTISGGGANTYYADSVKGRFTISSDNSKSTLYLQMNSLRAADTAVYYCAKGGMGGYYYGMDVWGQGTTVTVSS

SEQ ID NO: 507 - protein, 125 aa, artificial
  16A4.1 (1-474)(T144L) VH
QVQLQESGPGLAKPSETLSLTCTVSGDSITSYYWSWIRQPPGKGLEWIGYIYYSGSTNYNPSLKSRVTISVDTSKNQFSLKLSSVTAADTAVYYCARDQRRIAAAGTHFYGMDVWGQGTLVTVSS

SEQ ID NO: 508 - protein, 120 aa, artificial; identical to SEQ ID NO: 368
  19B5.1 VH

SEQ ID NO: 509 - protein, 120 aa, artificial
  19B5.1 (1-469)(W133Y) VH
QVQLVQSGAEVKKPGASVKVSCKVSGYTFTSYFIHWVRQAPGQGLEWMGIINPISVSTSYAQKFQGRVTMTRDTSTSTVFMELSSLRSEDTAVYYCARGGIQLYLHLDYWGQGTLVTVSS

SEQ ID NO: 510 - protein, 120 aa, artificial; identical to SEQ ID NO: 368
  19B5.1 VH

SEQ ID NO: 511 - protein, 120 aa, artificial; identical to SEQ ID NO: 368
  19B5.1 VH

SEQ ID NO: 512 - protein, 120 aa, artificial; identical to SEQ ID NO: 509
  19B5.1 (1-469)(W133Y) VH

SEQ ID NO: 513 - protein, 125 aa, artificial
  23A10.3 (1-474)(L92Q) VH
QVQLVESGGGVVQPGRSLRLSCAASGFTFSRYGIHWVRQAPGKGLEWVAVIWYDGSNKYYADSVKGRFTISRDNSKNTLYLQMNSLRAEDSAVYYCARRAGIPGTTGYYYGMDVWGQGTTVTVSS

SEQ ID NO: 514 - protein, 125 aa, artificial
  23A10.3 (1-474)(R17G,L92Q) VH
QVQLVESGGGVVQPGGSLRLSCAASGFTFSRYGIHWVRQAPGKGLEWVAVIWYDGSNKYYADSVKGRFTISRDNSKNTLYLQMNSLRAEDSAVYYCARRAGIPGTTGYYYGMDVWGQGTTVTVSS

SEQ ID NO: 515 - protein, 125 aa, artificial
  23A10.3 (1-474)(R17G,D61E,D72E,L92Q) VH
QVQLVESGGGVVQPGGSLRLSCAASGFTFSRYGIHWVRQAPGKGLEWVAVIWYEGSNKYYAESVKGRFTISRDNSKNTLYLQMNSLRAEDSAVYYCARRAGIPGTTGYYYGMDVWGQGTTVTVSS

SEQ ID NO: 516 - protein, 125 aa, artificial; identical to SEQ ID NO: 390
  23A10.3 VH

SEQ ID NO: 517 - protein, 120 aa, artificial; identical to SEQ ID NO: 461
  25G10.1 VH

SEQ ID NO: 518 - protein, 120 aa, artificial
  25G10.1 (1-469)(D109E,W132Y,W135Y) VH
QVQLQESGPGLVKPSETLSLTCTVSGGSISGYYWSWIRQPPGKGLEWIGYIYYIGSTNYNPSLKSRVTMSVDTSKNQFSLKLSSVTAADTAVYYCAREGSSGYYRYFDPWGQGTLVTVSS

SEQ ID NO: 519 - protein, 120 aa, artificial; identical to SEQ ID NO: 372
  26D1.1 VH

SEQ ID NO: 520 - protein, 120 aa, artificial; identical to SEQ ID NO: 372
  26D1.1 VH

SEQ ID NO: 521 - protein, 120 aa, artificial; identical to SEQ ID NO: 372
  26D1.1 VH

SEQ ID NO: 522 - protein, 120 aa, artificial; identical to SEQ ID NO: 372
  26D1.1 VH

SEQ ID NO: 523 - protein, 120 aa, artificial
  26D1.1 (1-469)(W133Y) VH
QVQLVQSGAEVKKPGASVKVSCKASRYTFTSYYMSWVRQAPGQGLEWMGIIHPSGGDTTYAQKFQGRVTMTGDTSTSTVYMELSSLRSEDTAVYYCARGGIKLYLHFDYWGQGTLVTVSS

SEQ ID NO: 524 - protein, 120 aa, artificial
  26D1.1 (1-469)(R27G,G82R) VH
QVQLVQSGAEVKKPGASVKVSCKASGYTFTSYYMSWVRQAPGQGLEWMGIIHPSGGDTTYAQKFQGRVTMTRDTSTSTVYMELSSLRSEDTAVYYCARGGIKLWLHFDYWGQGTLVTVSS

SEQ ID NO: 525 - protein, 120 aa, artificial; identical to SEQ ID NO: 344
  26F12.1 VH

SEQ ID NO: 526 - protein, 120 aa, artificial; identical to SEQ ID NO: 344
  26F12.1 VH

SEQ ID NO: 527 - protein, 120 aa, artificial
  26F12.1 (1-469)(W133Y) VH
QVQLVQSGAEVKKPGASVKVSCKASRYTFTNYYMSWVRQAPGQGLEWMGIINPSGGDSTYAQKFQGRLTMTGDTSTSTVYMELSSLRSEDTAVYYCARGGIQLYLHFDYWGQGTLVTVSS

SEQ ID NO: 528 - protein, 120 aa, artificial; identical to SEQ ID NO: 527
  26F12.1 (1-469)(W133Y) VH

SEQ ID NO: 529 - protein, 120 aa, artificial; identical to SEQ ID NO: 370
  25F8.1 VH

SEQ ID NO: 530 - protein, 120 aa, artificial; identical to SEQ ID NO: 370
  25F8.1 VH

SEQ ID NO: 531 - protein, 120 aa, artificial
  25F8.1 (1-469)(F90Y) VH
QVQLVQSGAEVKKPGASVKVSCKASGYTFTSYYIHWVRQAPGQGLEWMGIINPSGGSTRYAQKFQGRVTMTRDTSTSTVYMELSSLRSEDTAVYYCARGGIQLWLHFDYWGQGTLVTVSS

SEQ ID NO: 532 - protein, 120 aa, artificial; identical to SEQ ID NO: 531
  25F8.1 (1-469)(F90Y) VH

SEQ ID NO: 533 - protein, 120 aa, artificial
  25F8.1 (1-469)(F90Y,W133Y) VH
QVQLVQSGAEVKKPGASVKVSCKASGYTFTSYYIHWVRQAPGQGLEWMGIINPSGGSTRYAQKFQGRVTMTRDTSTSTVYMELSSLRSEDTAVYYCARGGIQLYLHFDYWGQGTLVTVSS

SEQ ID NO: 534 - protein, 120 aa, artificial; identical to SEQ ID NO: 366
  22D1.1 VH

SEQ ID NO: 535 - protein, 120 aa, artificial; identical to SEQ ID NO: 366
  22D1.1 VH

SEQ ID NO: 536 - protein, 120 aa, artificial
  22D1.1 (1-469)(W133Y) VH
QVQLVQSGAEVKKPGASVRVSCKVSGYTFTSYFIHWVRQAPGQGLEWMGIINPISVSTSYAQKFQGRVTMTRDTSTSTVFMELSSLRSEDTAVYYCARGGIQLYLHLDYWGQGTLVTVSS

SEQ ID NO: 537 - protein, 120 aa, artificial; identical to SEQ ID NO: 536
  22D1.1 (1-469)(W133Y) VH

SEQ ID NO: 538 - protein, 120 aa, artificial
  22D1.1 (1-469)(F90Y) VH
QVQLVQSGAEVKKPGASVRVSCKVSGYTFTSYFIHWVRQAPGQGLEWMGIINPISVSTSYAQKFQGRVTMTRDTSTSTVYMELSSLRSEDTAVYYCARGGIQLWLHLDYWGQGTLVTVSS

SEQ ID NO: 539 - protein, 116 aa, artificial; identical to SEQ ID NO: 364
  4F7 VH

SEQ ID NO: 540 - protein, 125 aa, artificial; identical to SEQ ID NO: 384
  2G6 VH

SEQ ID NO: 541 - protein, 125 aa, artificial
  2G6 (1-477)(R17G,K94N) VH
QVQLVESGGGVVQPGGSLRLSCAASGFTFSSYGMHWVRQAPGKGLEWVAFIWYDGSNKYYADSVKDRFTISRDNSKNTLYLQMNSLRAEDTAVYYCARRAGIIGTIGYYYGMDVWGQGTTVTVSS

SEQ ID NO: 542 - protein, 125 aa, artificial
  2G6 (1-477)(D61E,D72E) VH
QVQLVESGGGVVQPGRSLRLSCAASGFTFSSYGMHWVRQAPGKGLEWVAFIWYEGSNKYYAESVKDRFTISRDNSKNTLYLQMKSLRAEDTAVYYCARRAGIIGTIGYYYGMDVWGQGTTVTVSS

SEQ ID NO: 543 - protein, 125 aa, artificial
  2G6 (1-477)(R17G) VH
QVQLVESGGGVVQPGGSLRLSCAASGFTFSSYGMHWVRQAPGKGLEWVAFIWYDGSNKYYADSVKDRFTISRDNSKNTLYLQMKSLRAEDTAVYYCARRAGIIGTIGYYYGMDVWGQGTTVTVSS

SEQ ID NO: 544 - protein, 108 aa, artificial; identical to SEQ ID NO: 404
  4F3 VL

SEQ ID NO: 545 - protein, 112 aa, artificial; identical to SEQ ID NO: 418
  4A9 VL

SEQ ID NO: 546 - protein, 108 aa, artificial; identical to SEQ ID NO: 402
  4B10 VL

SEQ ID NO: 547 - protein, 109 aa, artificial; identical to SEQ ID NO: 394
  17H8.2 VL

SEQ ID NO: 548 - protein, 109 aa, artificial; identical to SEQ ID NO: 410
  16C1.1 VL

SEQ ID NO: 549 - protein, 109 aa, artificial; identical to SEQ ID NO: 414
  16A4.1 VL

SEQ ID NO: 550 - protein, 108 aa, artificial; identical to SEQ ID NO: 434
  22G10.1 VL

SEQ ID NO: 551 - protein, 111 aa, artificial; identical to SEQ ID NO: 398
  20D3.1 VL

SEQ ID NO: 552 - protein, 111 aa, artificial; identical to SEQ ID NO: 422
  22D1.1 VL

SEQ ID NO: 553 - protein, 111 aa, artificial; identical to SEQ ID NO: 426
  25F8.1 VL

SEQ ID NO: 554 - protein, 111 aa, artificial; identical to SEQ ID NO: 400
  26F12.1 VL

SEQ ID NO: 555 - protein, 111 aa, artificial; identical to SEQ ID NO: 428
  26D1.1 VL

SEQ ID NO: 556 - protein, 109 aa, artificial; identical to SEQ ID NO: 412
  25G10.1 VL

SEQ ID NO: 557 - protein, 111 aa, artificial; identical to SEQ ID NO: 424
  19B5.1 VL

SEQ ID NO: 558 - protein, 108 aa, artificial
  4A2 (1-236)(N30Q) VL
EIVLTQSPGTLSLSPGERATLSCRASRQISSSYLAWYQQKPGQAPRLLIYGPSSRATGIPDRFSGSGSGTDFTLTISRLEPEDFTVYYCQQYGSSFTFGPGTKVDIKR

SEQ ID NO: 559 - protein, 108 aa, artificial
  4A2 (1-236)(N30Q,T102A,P141Q) VL
EIVLTQSPGTLSLSPGERATLSCRASRQISSSYLAWYQQKPGQAPRLLIYGPSSRATGIPDRFSGSGSGTDFTLTISRLEPEDFAVYYCQQYGSSFTFGQGTKVDIKR

SEQ ID NO: 560 - protein, 108 aa, artificial
  4A2 (1-236)(N30Q,T102A) VL
EIVLTQSPGTLSLSPGERATLSCRASRQISSSYLAWYQQKPGQAPRLLIYGPSSRATGIPDRFSGSGSGTDFTLTISRLEPEDFAVYYCQQYGSSFTFGPGTKVDIKR

SEQ ID NO: 561 - protein, 108 aa, artificial; identical to SEQ ID NO: 560
  4A2 (1-236)(N30Q,T102A) VL

SEQ ID NO: 562 - protein, 108 aa, artificial; identical to SEQ ID NO: 559
  4A2 (1-236)(N30Q,T102A,P141Q) VL

SEQ ID NO: 563 - protein, 108 aa, artificial; identical to SEQ ID NO: 559
  4A2 (1-236)(N30Q,T102A,P141Q) VL

SEQ ID NO: 564 - protein, 108 aa, artificial
  4A2 (1-236)(R29Q,N30S) VL
EIVLTQSPGTLSLSPGERATLSCRASQSISSSYLAWYQQKPGQAPRLLIYGPSSRATGIPDRFSGSGSGTDFTLTISRLEPEDFTVYYCQQYGSSFTFGPGTKVDIKR

SEQ ID NO: 565 - protein, 108 aa, artificial; identical to SEQ ID NO: 404
  4F3 VL

SEQ ID NO: 566 - protein, 108 aa, artificial; identical to SEQ ID NO: 404
  4F3 VL

SEQ ID NO: 567 - protein, 108 aa, artificial; identical to SEQ ID NO: 404
  4F3 VL

SEQ ID NO: 568 - protein, 108 aa, artificial; identical to SEQ ID NO: 404
  4F3 VL

SEQ ID NO: 569 - protein, 108 aa, artificial; identical to SEQ ID NO: 404
  4F3 VL

SEQ ID NO: 570 - protein, 107 aa, artificial
  2G6 (1-234)(C42S,D110E) VL
SYELTQPPSVSVSPGQTASITCSGDRLGEKYTSWYQQRPGQSPLLVIYQDTKRPSGIPERFSGSNSGNTATLTISGTQAMDEADYYCQAWESSTVVFGGGTKLTVLG

SEQ ID NO: 571 - protein, 109 aa, artificial
  16C1.1 (1-235)(H105Y) VL
EIVLTQSPGTLSLSPGERATLSCRASQSVSSSYLAWYQQKPGQAPRLLIFGASSRATGIPDRFSGSGSGTDFTLTISGLEPEDFAVYYCQQYGNSPLTFGGGTKVEIKR

SEQ ID NO: 572 - protein, 109 aa, artificial; identical to SEQ ID NO: 571
  16C1.1 (1-235)(H105Y) VL

SEQ ID NO: 573 - protein, 109 aa, artificial; identical to SEQ ID NO: 571
  16C1.1 (1-235)(H105Y) VL

SEQ ID NO: 574 - protein, 109 aa, artificial; identical to SEQ ID NO: 571
  16C1.1 (1-235)(H105Y) VL

SEQ ID NO: 575 - protein, 109 aa, artificial
  16C1.1 (1-235)(G95R,H105Y,G141Q) VL
EIVLTQSPGTLSLSPGERATLSCRASQSVSSSYLAWYQQKPGQAPRLLIFGASSRATGIPDRFSGSGSGTDFTLTISRLEPEDFAVYYCQQYGNSPLTFGQGTKVEIKR

SEQ ID NO: 576 - protein, 109 aa, artificial
  17H8.2 (1-235)(G149R) VL
DIVLTQSPGTLSLSPGERATLSCRASQSVAGSYLAWYQQKPGQAPRLLISGASSRATGIPDRFSGSGSGTDFTLTISRLEPEDFAVYYCQQYGKSPITFGQGTRLEMKR

SEQ ID NO: 577 - protein, 109 aa, artificial; identical to SEQ ID NO: 576
  17H8.2 (1-235)(G149R) VL

SEQ ID NO: 578 - protein, 109 aa, artificial; identical to SEQ ID NO: 576
  17H8.2 (1-235)(G149R) VL

SEQ ID NO: 579 - protein, 109 aa, artificial
  17H8.2 (1-235)(S57Y,G149R) VL
DIVLTQSPGTLSLSPGERATLSCRASQSVAGSYLAWYQQKPGQAPRLLIYGASSRATGIPDRFSGSGSGTDFTLTISRLEPEDFAVYYCQQYGKSPITFGQGTRLEMKR

SEQ ID NO: 580 - protein, 112 aa, artificial
  4F7 (1-239)(H57Y) VL
QSVLTQPPSVSGAPGQRVTISCTGSSSNIGTGYDVHWYQQLPGTAPKLLIYGNSNRPSGVPDRFSGSKSGTSASLAITGLQAEDEADYYCQSYDSSLSGWVFGGGTRLTVLG

SEQ ID NO: 581 - protein, 112 aa, artificial
  4F7 (1-239)(H57Y,D110E) VL
QSVLTQPPSVSGAPGQRVTISCTGSSSNIGTGYDVHWYQQLPGTAPKLLIYGNSNRPSGVPDRFSGSKSGTSASLAITGLQAEDEADYYCQSYESSLSGWVFGGGTRLTVLG

SEQ ID NO: 582 - protein, 112 aa, artificial
  4F7 (1-239)(D110E) VL
QSVLTQPPSVSGAPGQRVTISCTGSSSNIGTGYDVHWYQQLPGTAPKLLIHGNSNRPSGVPDRFSGSKSGTSASLAITGLQAEDEADYYCQSYESSLSGWVFGGGTRLTVLG

SEQ ID NO: 583 - protein, 108 aa, artificial
  4B10 (1-236)(H45Q,A90T) VL
EIVLTQSPGTLSLSPGERATLSCRASQSVSNTYLAWYQQRPGQAPRLLIYGASSRATGIPDRFSGSGSGTDFTLTISSLEPEDFAVYYCQQYSNSWTFGQGTKVEIKR

SEQ ID NO: 584 - protein, 108 aa, artificial; identical to SEQ ID NO: 583
  4B10 (1-236)(H45Q,A90T) VL

SEQ ID NO: 585 - protein, 108 aa, artificial; identical to SEQ ID NO: 583
  4B10 (1-236)(H45Q,A90T) VL

SEQ ID NO: 586 - protein, 108 aa, artificial; identical to SEQ ID NO: 583
  4B10 (1-236)(H45Q,A90T) VL

SEQ ID NO: 587 - protein, 112 aa, artificial
  4A9 (1-239)(F47L) VL
QSVLTQPPSVSGAPGQRVTISCTGSSSNIGTGYAVHWYQQLPGTAPKLLIYGNNNRPSGVPDRFSGSKSGTSASLAITGLQAEDEADYYCQSYDSRLSGWVFGGGTKLTVLG

SEQ ID NO: 588 - protein, 112 aa, artificial; identical to SEQ ID NO: 587
  4A9 (1-239)(F47L) VL

SEQ ID NO: 589 - protein, 112 aa, artificial
  4A9 (1-239)(F47L,D110E) VL
QSVLTQPPSVSGAPGQRVTISCTGSSSNIGTGYAVHWYQQLPGTAPKLLIYGNNNRPSGVPDRFSGSKSGTSASLAITGLQAEDEADYYCQSYESRLSGWVFGGGTKLTVLG

SEQ ID NO: 590 - protein, 112 aa, artificial; identical to SEQ ID NO: 589
  4A9 (1-239)(F47L,D110E) VL

SEQ ID NO: 591 - protein, 111 aa, artificial
  20D3.1 (1-235)(S102A) VL
QSALTQPPSATGTPGQRVTISCSGSSSNIGSNFVNWYKQLPGTAPKVLIYTNNQRPSGVPDRFSGSKSGTSASLAISGLQSEDEADYYCATWDDSLNGWVFGGGTKLTVLG

SEQ ID NO: 592 - protein, 111 aa, artificial
  20D3.1 (1-235)(K45Q,S102A) VL
QSALTQPPSATGTPGQRVTISCSGSSSNIGSNFVNWYQQLPGTAPKVLIYTNNQRPSGVPDRFSGSKSGTSASLAISGLQSEDEADYYCATWDDSLNGWVFGGGTKLTVLG

SEQ ID NO: 593 - protein, 111 aa, artificial; identical to SEQ ID NO: 592
  20D3.1 (1-235)(K45Q,S102A) VL

SEQ ID NO: 594 - protein, 111 aa, artificial
  20D3.1 (1-235)(K45Q,S102A,D111E,N135Q) VL
QSALTQPPSATGTPGQRVTISCSGSSSNIGSNFVNWYQQLPGTAPKVLIYTNNQRPSGVPDRFSGSKSGTSASLAISGLQSEDEADYYCATWDESLQGWVFGGGTKLTVLG

SEQ ID NO: 595 - protein, 111 aa, artificial
  20D3.1 (1-235)(W109Y) VL
QSALTQPPSATGTPGQRVTISCSGSSSNIGSNFVNWYKQLPGTAPKVLIYTNNQRPSGVPDRFSGSKSGTSASLAISGLQSEDESDYYCATYDDSLNGWVFGGGTKLTVLG

SEQ ID NO: 596 - protein, 108 aa, artificial; identical to SEQ ID NO: 434
  22G10.1 VL

SEQ ID NO: 597 - protein, 108 aa, artificial; identical to SEQ ID NO: 434
  22G10.1 VL

SEQ ID NO: 598 - protein, 108 aa, artificial
  22G10.1 (1-234)(Q97E,S98P) VL
EIVMTQSPVTLSLSLGERATLSCRASQSISSNLAWFQQKPGQAPRLLIYGAFTRATGIPARVSGSGSGTEFTLTISSLEPEDFAVYYCQQYNYWPLTFGGGTKVEIKR

SEQ ID NO: 599 - protein, 108 aa, artificial
  22G10.1 (1-234)(V78F,Q97E,S98P) VL
EIVMTQSPVTLSLSLGERATLSCRASQSISSNLAWFQQKPGQAPRLLIYGAFTRATGIPARFSGSGSGTEFTLTISSLEPEDFAVYYCQQYNYWPLTFGGGTKVEIKR

SEQ ID NO: 600 - protein, 108 aa, artificial; identical to SEQ ID NO: 599
  22G10.1 (1-234)(V78F,Q97E,S98P) VL

SEQ ID NO: 601 - protein, 108 aa, artificial; identical to SEQ ID NO: 434
  22G10.1 VL

SEQ ID NO: 602 - protein, 109 aa, artificial
  16A4.1 (1-235)(G141Q) VL
EIVLTQSPGTLSLSPGERATLSCRASQSVSSSYLAWYQQKPGQAPRLLIYGTSSRATGIPDRFSGSGSGTDFTLTISRLEPEDFAVYYCQQYGSSPFTFGQGTKVEIKR

SEQ ID NO: 603 - protein, 111 aa, artificial
  19B5.1 (1-235)(K45Q,S102A) VL
QSALTQPPSTTGTPGQRVTISCSGSRSNIGSNFVNWYQQLPGTAPKVLIYTNNQRPSGVPDRFSGSKSGTSASLAISGLQSEDEADYYCATWDDSMNGWVFGGGTKLTVLG

SEQ ID NO: 604 - protein, 111 aa, artificial; identical to SEQ ID NO: 603
  19B5.1 (1-235)(K45Q,S102A) VL

SEQ ID NO: 605 - protein, 111 aa, artificial
  19B5.1 (1-235)(T11V,K45Q,S102A) VL
QSALTQPPSVTGTPGQRVTISCSGSRSNIGSNFVNWYQQLPGTAPKVLIYTNNQRPSGVPDRFSGSKSGTSASLAISGLQSEDEADYYCATWDDSMNGWVFGGGTKLTVLG

SEQ ID NO: 606 - protein, 111 aa, artificial
  19B5.1 (1-235)(T11V,K45Q,S102A,D111E,N135Q) VL
QSALTQPPSVTGTPGQRVTISCSGSRSNIGSNFVNWYQQLPGTAPKVLIYTNNQRPSGVPDRFSGSKSGTSASLAISGLQSEDEADYYCATWDESMQGWVFGGGTKLTVLG

SEQ ID NO: 607 - protein, 111 aa, artificial
  19B5.1 (1-235)(T11V,K45Q,S102A,W109Y,D111E,N135Q) VL
QSALTQPPSVTGTPGQRVTISCSGSRSNIGSNFVNWYQQLPGTAPKVLIYTNNQRPSGVPDRFSGSKSGTSASLAISGLQSEDEADYYCATYDESMQGWVFGGGTKLTVLG

SEQ ID NO: 608 - protein, 107 aa, artificial
  23A10.3 (1-231)(C42S) VL
SYELTQPPSVSVSPGQTASITCSGDRLGEKYVSWYQQKPGQSPILVIYQDNKWPSGIPERFSGSNSGNTATLTISGTQAMDEADYYCQAWDSSTVVFGGGTKLTVLG

SEQ ID NO: 609 - protein, 107 aa, artificial; identical to SEQ ID NO: 608
  23A10.3 (1-231)(C42S) VL

SEQ ID NO: 610 - protein, 107 aa, artificial
  23A10.3 (1-231)(C42S,D110E) VL
SYELTQPPSVSVSPGQTASITCSGDRLGEKYVSWYQQKPGQSPILVIYQDNKWPSGIPERFSGSNSGNTATLTISGTQAMDEADYYCQAWESSTVVFGGGTKLTVLG

SEQ ID NO: 611 - protein, 107 aa, artificial
  23A10.3 (1-231)(C42Y) VL
SYELTQPPSVSVSPGQTASITCSGDRLGEKYVYWYQQKPGQSPILVIYQDNKWPSGIPERFSGSNSGNTATLTISGTQAMDEADYYCQAWDSSTVVFGGGTKLTVLG

SEQ ID NO: 612 - protein, 109 aa, artificial
  25G10.1 (1-235)(H105Y) VL
EIVLTQSPGTLSLSPGERATLSCRASQSVSSSYLAWYQQKPGQAPRLLIFGASSRATGIPDRFSGSGSGTDFTLTISRLEPEDFAVYYCQQYGNSPLTFGGGTKVEIKR

SEQ ID NO: 613 - protein, 109 aa, artificial; identical to SEQ ID NO: 612
  25G10.1 (1-235)(H105Y) VL

SEQ ID NO: 614 - protein, 111 aa, artificial
  26D1.1 (1-235)(S7P) VL
HSVLTQPPSASGTPGQRVTISCSGSRSNIGSNFVNWYQQLPGTAPKLLIYTNNQRPSGVPDRFSGSKSGTSASLAISGLQSEDEADYYCAVWDDSLNGWVFGGGTKLTVLG

SEQ ID NO: 615 - protein, 111 aa, artificial
  26D1.1 (1-235)(H1Q,S7P) VL
QSVLTQPPSASGTPGQRVTISCSGSRSNIGSNFVNWYQQLPGTAPKLLIYTNNQRPSGVPDRFSGSKSGTSASLAISGLQSEDEADYYCAVWDDSLNGWVFGGGTKLTVLG

SEQ ID NO: 616 - protein, 111 aa, artificial
  26D1.1 (1-235)(H1Q,S7P,W109Y) VL
QSVLTQPPSASGTPGQRVTISCSGSRSNIGSNFVNWYQQLPGTAPKLLIYTNNQRPSGVPDRFSGSKSGTSASLAISGLQSEDEADYYCAVYDDSLNGWVFGGGTKLTVLG

SEQ ID NO: 617 - protein, 111 aa, artificial
  26D1.1 (1-235)(H1Q,S7P,W109Y,D111E,N135Q) VL
QSVLTQPPSASGTPGQRVTISCSGSRSNIGSNFVNWYQQLPGTAPKLLIYTNNQRPSGVPDRFSGSKSGTSASLAISGLQSEDEADYYCAVYDESLQGWVFGGGTKLTVLG

SEQ ID NO: 618 - protein, 111 aa, artificial; identical to SEQ ID NO: 617
  26D1.1 (1-235)(H1Q,S7P,W109Y,D111E,N135Q) VL

SEQ ID NO: 619 - protein, 111 aa, artificial; identical to SEQ ID NO: 615
  26D1.1 (1-235)(H1Q,S7P) VL

SEQ ID NO: 620 - protein, 111 aa, artificial
  26F12.1 (1-235)(S7P) VL
QSVLTQPPSASGTPGQKVTISCSGSRSNIGSNFVNWYQQLPGTAPKLLIYTNYQRPSGVPDRFSGSKSGTSASLAISGLQSEDEADYYCAVWDDSLNGWVFGGGTKLTVLG

SEQ ID NO: 621 - protein, 111 aa, artificial
  26F12.1 (1-235)(S7P,D111E) VL
QSVLTQPPSASGTPGQKVTISCSGSRSNIGSNFVNWYQQLPGTAPKLLIYTNYQRPSGVPDRFSGSKSGTSASLAISGLQSEDEADYYCAVWDESLNGWVFGGGTKLTVLG

SEQ ID NO: 622 - protein, 111 aa, artificial; identical to SEQ ID NO: 621
  26F12.1 (1-235)(S7P,D111E) VL

SEQ ID NO: 623 - protein, 111 aa, artificial
  26F12.1 (1-235)(S7P,W109Y,D111E,N135Q) VL
QSVLTQPPSASGTPGQKVTISCSGSRSNIGSNFVNWYQQLPGTAPKLLIYTNYQRPSGVPDRFSGSKSGTSASLAISGLQSEDEADYYCAVYDESLQGWVFGGGTKLTVLG

SEQ ID NO: 624 - protein, 111 aa, artificial
  25F8.1 (1-235)(K45Q) VL
QSALTQPPSATGTPGQRVTISCSGSSSNIGRNFVNWYQQLPGTAPKVLIYTNNQRPSGVPDRFSGSKSGTSASLAISGLQSEDESDYYCAAWDDSLNGWVFGGGTKLTVLG

SEQ ID NO: 625 - protein, 111 aa, artificial
  25F8.1 (1-235)(K45Q,S102A) VL
QSALTQPPSATGTPGQRVTISCSGSSSNIGRNFVNWYQQLPGTAPKVLIYTNNQRPSGVPDRFSGSKSGTSASLAISGLQSEDEADYYCAAWDDSLNGWVFGGGTKLTVLG

SEQ ID NO: 626 - protein, 111 aa, artificial; identical to SEQ ID NO: 625
  25F8.1 (1-235)(K45Q,S102A) VL

SEQ ID NO: 627 - protein, 111 aa, artificial
  25F8.1 (1-235)(K45Q,S102A,D111E) VL
QSALTQPPSATGTPGQRVTISCSGSSSNIGRNFVNWYQQLPGTAPKVLIYTNNQRPSGVPDRFSGSKSGTSASLAISGLQSEDEADYYCAAWDESLNGWVFGGGTKLTVLG

SEQ ID NO: 628 - protein, 111 aa, artificial
  25F8.1 (1-235)(K45Q,S102A,D111E,N135Q) VL
QSALTQPPSATGTPGQRVTISCSGSSSNIGRNFVNWYQQLPGTAPKVLIYTNNQRPSGVPDRFSGSKSGTSASLAISGLQSEDEADYYCAAWDESLQGWVFGGGTKLTVLG

SEQ ID NO: 629 - protein, 111 aa, artificial
  22D1.1 (1-235)(K45Q,S102A) VL
QSALTQPPSATGTPGQRVTISCSGSSSNIGSNFVNWYQQLPGTAPKVLIYTNNQRPSGVPDRFSGSKSGTSASLAISGLQSEDEADYYCATWDDSMNGWVFGGGTKLTVLG

SEQ ID NO: 630 - protein, 111 aa, artificial
  22D1.1 (1-235)(K45Q,S102A,D111E,N135Q) VL
QSALTQPPSATGTPGQRVTISCSGSSSNIGSNFVNWYQQLPGTAPKVLIYTNNQRPSGVPDRFSGSKSGTSASLAISGLQSEDEADYYCATWDESMQGWVFGGGTKLTVLG

SEQ ID NO: 631 - protein, 111 aa, artificial
  22D1.1 (1-235)(K45Q,S102A,W109Y,D111E,N135Q) VL
QSALTQPPSATGTPGQRVTISCSGSSSNIGSNFVNWYQQLPGTAPKVLIYTNNQRPSGVPDRFSGSKSGTSASLAISGLQSEDEADYYCATYDESMQGWVFGGGTKLTVLG

SEQ ID NO: 632 - protein, 111 aa, artificial
  22D1.1 (1-235)(K45Q,S102A,W109Y) VL
QSALTQPPSATGTPGQRVTISCSGSSSNIGSNFVNWYQQLPGTAPKVLIYTNNQRPSGVPDRFSGSKSGTSASLAISGLQSEDEADYYCATYDDSMNGWVFGGGTKLTVLG

SEQ ID NO: 633 - protein, 111 aa, artificial; identical to SEQ ID NO: 629
  22D1.1 (1-235)(K45Q,S102A) VL

SEQ ID NO: 634 - protein, 112 aa, artificial; identical to SEQ ID NO: 420
  4F7 VL

SEQ ID NO: 635 - protein, 107 aa, artificial
  2G6 (1-234)(D110E) VL
SYELTQPPSVSVSPGQTASITCSGDRLGEKYTCWYQQRPGQSPLLVIYQDTKRPSGIPERFSGSNSGNTATLTISGTQAMDEADYYCQAWESSTVVFGGGTKLTVLG

SEQ ID NO: 636 - protein, 107 aa, artificial; identical to SEQ ID NO: 570
  2G6 (1-234)(C42S,D110E) VL

SEQ ID NO: 637 - protein, 107 aa, artificial; identical to SEQ ID NO: 570
  2G6 (1-234)(C42S,D110E) VL

SEQ ID NO: 638 - protein, 107 aa, artificial; identical to SEQ ID NO: 608
  23A10.3 (1-231)(C42S) VL

SEQ ID NO: 639 - DNA, 1368 bp, artificial
  2G6 HC
caggtgcagttggtggagtctgggggaggcgtggtccagcctgggaggtccctgagactctcctgtgcagcgtctggattcaccttcagtagctatggcatgcactgggtccgccaggctccaggcaaggggctggagtgggtggcatttatatggtatgatggaagtaataaatactatgcagactccgtgaaggaccgattcaccatctccagagacaattccaagaacacgctgtatctgcaaatgaaaagcctgagagctgaggacacggctgtgtattactgtgcgagaagggccggtataataggaactataggctactactacggtatggacgtctggggccaagggaccacggtcaccgtctctagtgcctccaccaagggcccatcggtcttccccctggcaccctcctccaagagcacctctgggggcacagcggccctgggctgcctggtcaaggactacttccccgaaccggtgacggtgtcgtggaactcaggcgccctgaccagcggcgtgcacaccttcccggctgtcctacagtcctcaggactctactccctcagcagcgtggtgaccgtgccctccagcagcttgggcacccagacctacatctgcaacgtgaatcacaagcccagcaacaccaaggtggacaagaaagttgagcccaaatcttgtgacaaaactcacacatgcccaccgtgcccagcacctgaactcctggggggaccgtcagtcttcctcttccccccaaaacccaaggacaccctcatgatctcccggacccctgaggtcacatgcgtggtggtggacgtgagccacgaagaccctgaggtcaagttcaactggtacgtggacggcgtggaggtgcataatgccaagacaaagccgcgggaggagcagtacaacagcacgtaccgtgtggtcagcgtcctcaccgtcctgcaccaggactggctgaatggcaaggagtacaagtgcaaggtctccaacaaagccctcccagcccccatcgagaaaaccatctccaaagccaaagggcagccccgagaaccacaggtgtacaccctgcccccatcccgggaggagatgaccaagaaccaggtcagcctgacctgcctggtcaaaggcttctatcccagcgacatcgccgtggagtgggagagcaatgggcagccggagaacaactacaagaccacgcctcccgtgctggactccgacggctccttcttcctctatagcaagctcaccgtggacaagagcaggtggcagcaggggaacgtcttctcatgctccgtgatgcatgaggctctgcacaaccactacacgcagaagagcctctccctgtctccgggtaaatga

SEQ ID NO: 640 - protein, 455 aa, artificial
  2G6 HC
QVQLVESGGGVVQPGRSLRLSCAASGFTFSSYGMHWVRQAPGKGLEWVAFIWYDGSNKYYADSVKDRFTISRDNSKNTLYLQMKSLRAEDTAVYYCARRAGIIGTIGYYYGMDVWGQGTTVTVSSASTKGPSVFPLAPSSKSTSGGTAALGCLVKDYFPEPVTVSWNSGALTSGVHTFPAVLQSSGLYSLSSVVTVPSSSLGTQTYICNVNHKPSNTKVDKKVEPKSCDKTHTCPPCPAPELLGGPSVFLFPPKPKDTLMISRTPEVTCVVVDVSHEDPEVKFNWYVDGVEVHNAKTKPREEQYNSTYRVVSVLTVLHQDWLNGKEYKCKVSNKALPAPIEKTISKAKGQPREPQVYTLPPSREEMTKNQVSLTCLVKGFYPSDIAVEWESNGQPENNYKTTPPVLDSDGSFFLYSKLTVDKSRWQQGNVFSCSVMHEALHNHYTQKSLSLSPGK

SEQ ID NO: 641 - DNA, 1353 bp, artificial
  4A2 HC
caggtgcagctgcaggagtcgggcccaggactggtgaagccttcacagaccctgtccctcacctgcactgtctctggtggctccatcagcagtagtggttactactggagctggatccgccagcacccagggaagggcctggagtggattgggtacatctattacactgggagcgcctactacaacccgtccctcaagagtcgagttaccatatcagtagacacgtctaagaaccagttctccctgaagctgagctctgtgactgccgcggacacggccgtgtattactgtgcgagagatggaagcagtggctggtacttccagtattggggccagggcaccctggtcaccgtctctagtgcctccaccaagggcccatcggtcttccccctggcaccctcctccaagagcacctctgggggcacagcggccctgggctgcctggtcaaggactacttccccgaaccggtgacggtgtcgtggaactcaggcgccctgaccagcggcgtgcacaccttcccggctgtcctacagtcctcaggactctactccctcagcagcgtggtgaccgtgccctccagcagcttgggcacccagacctacatctgcaacgtgaatcacaagcccagcaacaccaaggtggacaagaaagttgagcccaaatcttgtgacaaaactcacacatgcccaccgtgcccagcacctgaactcctggggggaccgtcagtcttcctcttccccccaaaacccaaggacaccctcatgatctcccggacccctgaggtcacatgcgtggtggtggacgtgagccacgaagaccctgaggtcaagttcaactggtacgtggacggcgtggaggtgcataatgccaagacaaagccgcgggaggagcagtacaacagcacgtaccgtgtggtcagcgtcctcaccgtcctgcaccaggactggctgaatggcaaggagtacaagtgcaaggtctccaacaaagccctcccagcccccatcgagaaaaccatctccaaagccaaagggcagccccgagaaccacaggtgtacaccctgcccccatcccgggaggagatgaccaagaaccaggtcagcctgacctgcctggtcaaaggcttctatcccagcgacatcgccgtggagtgggagagcaatgggcagccggagaacaactacaagaccacgcctcccgtgctggactccgacggctccttcttcctctatagcaagctcaccgtggacaagagcaggtggcagcaggggaacgtcttctcatgctccgtgatgcatgaggctctgcacaaccactacacgcagaagagcctctccctgtctccgggtaaatga

SEQ ID NO: 642 - protein, 450 aa, artificial
  4A2 HC
QVQLQESGPGLVKPSQTLSLTCTVSGGSISSSGYYWSWIRQHPGKGLEWIGYIYYTGSAYYNPSLKSRVTISVDTSKNQFSLKLSSVTAADTAVYYCARDGSSGWYFQYWGQGTLVTVSSASTKGPSVFPLAPSSKSTSGGTAALGCLVKDYFPEPVTVSWNSGALTSGVHTFPAVLQSSGLYSLSSVVTVPSSSLGTQTYICNVNHKPSNTKVDKKVEPKSCDKTHTCPPCPAPELLGGPSVFLFPPKPKDTLMISRTPEVTCVVVDVSHEDPEVKFNWYVDGVEVHNAKTKPREEQYNSTYRVVSVLTVLHQDWLNGKEYKCKVSNKALPAPIEKTISKAKGQPREPQVYTLPPSREEMTKNQVSLTCLVKGFYPSDIAVEWESNGQPENNYKTTPPVLDSDGSFFLYSKLTVDKSRWQQGNVFSCSVMHEALHNHYTQKSLSLSPGK

SEQ ID NO: 643 - DNA, 1341 bp, artificial
  4A9 HC
caggtgcagctgcaggagtcgggcccaggactggtgaagccttcggagaccctgtccctcacctgcactgtctctggtggctccatcagtggttactactggagctggatccggcagcccccaggaaagggactggagtggtttgcatatttctcttacagtgggagcaccaactacaacccctccctcaagagtcgagtcaccttatcagtagacacgtccaagaaccagttctccctgaagctgagctctgtgaccgctgcggacacggccgtgtattactgtgcgaggaactgggccttccactttgacttctggggccagggaaccctggtcaccgtctctagtgcctccaccaagggcccatcggtcttccccctggcaccctcctccaagagcacctctgggggcacagcggccctgggctgcctggtcaaggactacttccccgaaccggtgacggtgtcgtggaactcaggcgccctgaccagcggcgtgcacaccttcccggctgtcctacagtcctcaggactctactccctcagcagcgtggtgaccgtgccctccagcagcttgggcacccagacctacatctgcaacgtgaatcacaagcccagcaacaccaaggtggacaagaaagttgagcccaaatcttgtgacaaaactcacacatgcccaccgtgcccagcacctgaactcctggggggaccgtcagtcttcctcttccccccaaaacccaaggacaccctcatgatctcccggacccctgaggtcacatgcgtggtggtggacgtgagccacgaagaccctgaggtcaagttcaactggtacgtggacggcgtggaggtgcataatgccaagacaaagccgcgggaggagcagtacaacagcacgtaccgtgtggtcagcgtcctcaccgtcctgcaccaggactggctgaatggcaaggagtacaagtgcaaggtctccaacaaagccctcccagcccccatcgagaaaaccatctccaaagccaaagggcagccccgagaaccacaggtgtacaccctgcccccatcccgggaggagatgaccaagaaccaggtcagcctgacctgcctggtcaaaggcttctatcccagcgacatcgccgtggagtgggagagcaatgggcagccggagaacaactacaagaccacgcctcccgtgctggactccgacggctccttcttcctctatagcaagctcaccgtggacaagagcaggtggcagcaggggaacgtcttctcatgctccgtgatgcatgaggctctgcacaaccactacacgcagaagagcctctccctgtctccgggtaaatga

SEQ ID NO: 644 - protein, 446 aa, artificial
  4A9 HC
QVQLQESGPGLVKPSETLSLTCTVSGGSISGYYWSWIRQPPGKGLEWFAYFSYSGSTNYNPSLKSRVTLSVDTSKNQFSLKLSSVTAADTAVYYCARNWAFHFDFWGQGTLVTVSSASTKGPSVFPLAPSSKSTSGGTAALGCLVKDYFPEPVTVSWNSGALTSGVHTFPAVLQSSGLYSLSSVVTVPSSSLGTQTYICNVNHKPSNTKVDKKVEPKSCDKTHTCPPCPAPELLGGPSVFLFPPKPKDTLMISRTPEVTCVVVDVSHEDPEVKFNWYVDGVEVHNAKTKPREEQYNSTYRVVSVLTVLHQDWLNGKEYKCKVSNKALPAPIEKTISKAKGQPREPQVYTLPPSREEMTKNQVSLTCLVKGFYPSDIAVEWESNGQPENNYKTTPPVLDSDGSFFLYSKLTVDKSRWQQGNVFSCSVMHEALHNHYTQKSLSLSPGK

SEQ ID NO: 645 - DNA, 1350 bp, artificial
  4B10 HC
caggtgcagctggtggagtctgggggaggcgtggtccagcctgggaggtccctgagactctcctgtgcagcctctggattcaccttcagtagctatgacatgcactgggtccgccaggctccaggcaaggggctggagtgggtggcagttatatcatatgatggaactaatgaatactatgcagactccgtgaagggccgattcaccatctccagagacacttccaagaacacgctgtatttgcaaatgaacagcctgagagctgaggacacggctgtatattactgtgcgagagaacgatattttgactggtcttttgactactggggccagggaaccctggtcagcgtctctagtgcctccaccaagggcccatcggtcttccccctggcaccctcctccaagagcacctctgggggcacagcggccctgggctgcctggtcaaggactacttccccgaaccggtgacggtgtcgtggaactcaggcgccctgaccagcggcgtgcacaccttcccggctgtcctacagtcctcaggactctactccctcagcagcgtggtgaccgtgccctccagcagcttgggcacccagacctacatctgcaacgtgaatcacaagcccagcaacaccaaggtggacaagaaagttgagcccaaatcttgtgacaaaactcacacatgcccaccgtgcccagcacctgaactcctggggggaccgtcagtcttcctcttccccccaaaacccaaggacaccctcatgatctcccggacccctgaggtcacatgcgtggtggtggacgtgagccacgaagaccctgaggtcaagttcaactggtacgtggacggcgtggaggtgcataatgccaagacaaagccgcgggaggagcagtacaacagcacgtaccgtgtggtcagcgtcctcaccgtcctgcaccaggactggctgaatggcaaggagtacaagtgcaaggtctccaacaaagccctcccagcccccatcgagaaaaccatctccaaagccaaagggcagccccgagaaccacaggtgtacaccctgcccccatcccgggaggagatgaccaagaaccaggtcagcctgacctgcctggtcaaaggcttctatcccagcgacatcgccgtggagtgggagagcaatgggcagccggagaacaactacaagaccacgcctcccgtgctggactccgacggctccttcttcctctatagcaagctcaccgtggacaagagcaggtggcagcaggggaacgtcttctcatgctccgtgatgcatgaggctctgcacaaccactacacgcagaagagcctctccctgtctccgggtaaatga

SEQ ID NO: 646 - protein, 449 aa, artificial
  4B10 HC
QVQLVESGGGVVQPGRSLRLSCAASGFTFSSYDMHWVRQAPGKGLEWVAVISYDGTNEYYADSVKGRFTISRDTSKNTLYLQMNSLRAEDTAVYYCARERYFDWSFDYWGQGTLVSVSSASTKGPSVFPLAPSSKSTSGGTAALGCLVKDYFPEPVTVSWNSGALTSGVHTFPAVLQSSGLYSLSSVVTVPSSSLGTQTYICNVNHKPSNTKVDKKVEPKSCDKTHTCPPCPAPELLGGPSVFLFPPKPKDTLMISRTPEVTCVVVDVSHEDPEVKFNWYVDGVEVHNAKTKPREEQYNSTYRVVSVLTVLHQDWLNGKEYKCKVSNKALPAPIEKTISKAKGQPREPQVYTLPPSREEMTKNQVSLTCLVKGFYPSDIAVEWESNGQPENNYKTTPPVLDSDGSFFLYSKLTVDKSRWQQGNVFSCSVMHEALHNHYTQKSLSLSPGK

SEQ ID NO: 647 - DNA, 1350 bp, artificial
  4F3 HC
caggtgcagctggtggagtctgggggaggcgtggtccagcctgggaggtccctgagactctcctgtgcagcgtctggattctccttcagtagctatgacatggactgggtccgccagactccaggcaaggggctggagtgggtggcagttatatggtatgatggaagtaataaatactatgcagactccgtgaggggccgattcaccatctccagagacaattccaagaacacgctgtttctgcaaatgaacagcctgagagtcgaggacacggctgtgtattactgtgcgagagaaactggggagggctggtacttcgatctctggggccgtggcaccctggtcaccgtctctagtgcctccaccaagggcccatcggtcttccccctggcaccctcctccaagagcacctctgggggcacagcggccctgggctgcctggtcaaggactacttccccgaaccggtgacggtgtcgtggaactcaggcgccctgaccagcggcgtgcacaccttcccggctgtcctacagtcctcaggactctactccctcagcagcgtggtgaccgtgccctccagcagcttgggcacccagacctacatctgcaacgtgaatcacaagcccagcaacaccaaggtggacaagaaagttgagcccaaatcttgtgacaaaactcacacatgcccaccgtgcccagcacctgaactcctggggggaccgtcagtcttcctcttccccccaaaacccaaggacaccctcatgatctcccggacccctgaggtcacatgcgtggtggtggacgtgagccacgaagaccctgaggtcaagttcaactggtacgtggacggcgtggaggtgcataatgccaagacaaagccgcgggaggagcagtacaacagcacgtaccgtgtggtcagcgtcctcaccgtcctgcaccaggactggctgaatggcaaggagtacaagtgcaaggtctccaacaaagccctcccagcccccatcgagaaaaccatctccaaagccaaagggcagccccgagaaccacaggtgtacaccctgcccccatcccgggaggagatgaccaagaaccaggtcagcctgacctgcctggtcaaaggcttctatcccagcgacatcgccgtggagtgggagagcaatgggcagccggagaacaactacaagaccacgcctcccgtgctggactccgacggctccttcttcctctatagcaagctcaccgtggacaagagcaggtggcagcaggggaacgtcttctcatgctccgtgatgcatgaggctctgcacaaccactacacgcagaagagcctctccctgtctccgggtaaatga

SEQ ID NO: 648 - protein, 449 aa, artificial
  4F3 HC
QVQLVESGGGVVQPGRSLRLSCAASGFSFSSYDMDWVRQTPGKGLEWVAVIWYDGSNKYYADSVRGRFTISRDNSKNTLFLQMNSLRVEDTAVYYCARETGEGWYFDLWGRGTLVTVSSASTKGPSVFPLAPSSKSTSGGTAALGCLVKDYFPEPVTVSWNSGALTSGVHTFPAVLQSSGLYSLSSVVTVPSSSLGTQTYICNVNHKPSNTKVDKKVEPKSCDKTHTCPPCPAPELLGGPSVFLFPPKPKDTLMISRTPEVTCVVVDVSHEDPEVKFNWYVDGVEVHNAKTKPREEQYNSTYRVVSVLTVLHQDWLNGKEYKCKVSNKALPAPIEKTISKAKGQPREPQVYTLPPSREEMTKNQVSLTCLVKGFYPSDIAVEWESNGQPENNYKTTPPVLDSDGSFFLYSKLTVDKSRWQQGNVFSCSVMHEALHNHYTQKSLSLSPGK

SEQ ID NO: 649 - DNA, 1341 bp, artificial
  4F7 HC
caggtgcagctgcaggagtcgggcccaggactggtgaagccttcggagaccctgtccctcacctgcactgtctctggtggctccatcagtagttactcctggagctggatccggcagcccccagggaagggactggagtggattgggtatatctattacagtgggagcaccaactacaacccctccctcaagagtcgagtcaccatatcattagacacgtccaagaaccagttctccctgaagctgagctctgtgaccgctgcggacacggccgtgtattactgtgcgaggaactgggccttccactttgactactggggccagggaaccctggtcaccgtctctagtgcctccaccaagggcccatcggtcttccccctggcaccctcctccaagagcacctctgggggcacagcggccctgggctgcctggtcaaggactacttccccgaaccggtgacggtgtcgtggaactcaggcgccctgaccagcggcgtgcacaccttcccggctgtcctacagtcctcaggactctactccctcagcagcgtggtgaccgtgccctccagcagcttgggcacccagacctacatctgcaacgtgaatcacaagcccagcaacaccaaggtggacaagaaagttgagcccaaatcttgtgacaaaactcacacatgcccaccgtgcccagcacctgaactcctggggggaccgtcagtcttcctcttccccccaaaacccaaggacaccctcatgatctcccggacccctgaggtcacatgcgtggtggtggacgtgagccacgaagaccctgaggtcaagttcaactggtacgtggacggcgtggaggtgcataatgccaagacaaagccgcgggaggagcagtacaacagcacgtaccgtgtggtcagcgtcctcaccgtcctgcaccaggactggctgaatggcaaggagtacaagtgcaaggtctccaacaaagccctcccagcccccatcgagaaaaccatctccaaagccaaagggcagccccgagaaccacaggtgtacaccctgcccccatcccgggaggagatgaccaagaaccaggtcagcctgacctgcctggtcaaaggcttctatcccagcgacatcgccgtggagtgggagagcaatgggcagccggagaacaactacaagaccacgcctcccgtgctggactccgacggctccttcttcctctatagcaagctcaccgtggacaagagcaggtggcagcaggggaacgtcttctcatgctccgtgatgcatgaggctctgcacaaccactacacgcagaagagcctctccctgtctccgggtaaatga

SEQ ID NO: 650 - protein, 446 aa, artificial
  HC
QVQLQESGPGLVKPSETLSLTCTVSGGSISSYSWSWIRQPPGKGLEWIGYIYYSGSTNYNPSLKSRVTISLDTSKNQFSLKLSSVTAADTAVYYCARNWAFHFDYWGQGTLVTVSSASTKGPSVFPLAPSSKSTSGGTAALGCLVKDYFPEPVTVSWNSGALTSGVHTFPAVLQSSGLYSLSSVVTVPSSSLGTQTYICNVNHKPSNTKVDKKVEPKSCDKTHTCPPCPAPELLGGPSVFLFPPKPKDTLMISRTPEVTCVVVDVSHEDPEVKFNWYVDGVEVHNAKTKPREEQYNSTYRVVSVLTVLHQDWLNGKEYKCKVSNKALPAPIEKTISKAKGQPREPQVYTLPPSREEMTKNQVSLTCLVKGFYPSDIAVEWESNGQPENNYKTTPPVLDSDGSFFLYSKLTVDKSRWQQGNVFSCSVMHEALHNHYTQKSLSLSPGK

SEQ ID NO: 651 - DNA, 1368 bp, artificial
  16A4 HC
caggtgcagctgcaggagtcgggcccaggactggcgaagccttcggagaccctgtccctcacctgcactgtctctggtgactccatcactagttactactggagctggatccggcagcccccagggaagggactggagtggattgggtatatctattacagcgggagcaccaattacaacccctccctcaagagtcgagtcaccatatcagtagacacgtccaagaaccagttctccctgaagctgagttctgtgaccgctgcggacacggccgtgtattactgtgcgagagatcaaaggcggatagcagcagctggtacccacttctacggtatggacgtctggggccaagggaccacggtcactgtctcctcagcttccaccaagggcccatccgtcttccccctggcgccctcctccaagagcacctctgggggcacagcggccctgggctgcctggtcaaggactacttccccgaaccggtgacggtgtcgtggaactcaggggccctgaccagcggcgtgcacaccttcccggctgtcctacagtcctcaggactctactccctcagcagcgtggtgaccgtgccctccagcagcttgggcacccagacctacatctgcaacgtgaatcacaagcccagcaacaccaaggtggacaagaaagttgagcccaaatcttgtgacaaaactcacacatgcccaccgtgcccagcacctgaactcctggggggaccgtcagtcttcctcttccccccaaaacccaaggacaccctcatgatctcccggacccctgaggtcacatgcgtggtggtggacgtgagccacgaagaccctgaggtcaagttcaactggtacgtggacggcgtggaggtgcataatgccaagacaaagccgcgggaggagcagtacaacagcacgtaccgtgtggtcagcgtcctcaccgtcctgcaccaggactggctgaatggcaaggagtacaagtgcaaggtctccaacaaagccctcccagcccccatcgagaaaaccatctccaaagccaaagggcagccccgagaaccacaggtgtacaccctgcccccatcccgggaggagatgaccaagaaccaggtcagcctgacctgcctggtcaaaggcttctatcccagcgacatcgccgtggagtgggagagcaatgggcagccggagaacaactacaagaccacgcctcccgtgctggactccgacggctccttcttcctctatagcaagctcaccgtggacaagagcaggtggcagcaggggaacgtcttctcatgctccgtgatgcatgaggctctgcacaaccactacacgcagaagagcctctccctgtctccgggtaaatga

SEQ ID NO: 652 - protein, 455 aa, artificial
  16A4 HC
QVQLQESGPGLAKPSETLSLTCTVSGDSITSYYWSWIRQPPGKGLEWIGYIYYSGSTNYNPSLKSRVTISVDTSKNQFSLKLSSVTAADTAVYYCARDQRRIAAAGTHFYGMDVWGQGTTVTVSSASTKGPSVFPLAPSSKSTSGGTAALGCLVKDYFPEPVTVSWNSGALTSGVHTFPAVLQSSGLYSLSSVVTVPSSSLGTQTYICNVNHKPSNTKVDKKVEPKSCDKTHTCPPCPAPELLGGPSVFLFPPKPKDTLMISRTPEVTCVVVDVSHEDPEVKFNWYVDGVEVHNAKTKPREEQYNSTYRVVSVLTVLHQDWLNGKEYKCKVSNKALPAPIEKTISKAKGQPREPQVYTLPPSREEMTKNQVSLTCLVKGFYPSDIAVEWESNGQPENNYKTTPPVLDSDGSFFLYSKLTVDKSRWQQGNVFSCSVMHEALHNHYTQKSLSLSPGK

SEQ ID NO: 653 - DNA, 1353 bp, artificial
  16C1 HC
caggtgcagctgcaggagtcgggcccaggactggtgaagccttcggagaccctgtccctcacttgtactgtctctggtggctccatcagtggttactactggagctggatccggcagcccccagggaagggactggagtggattgggtatatctattacattgggagcaccaactacaacccctccctcaagagtcgagtcaccatgtcaatagacacgtccaagaaccagttctccctgacgctgagctctttgaccgctgcggacacggccgtgtatttctgtgcgagagatgggagcagtggctggtaccggtggttcgacccctggggccagggaaccctggtcaccgtctcctcagcttccaccaagggcccatccgtcttccccctggcgccctcctccaagagcacctctgggggcacagcggccctgggctgcctggtcaaggactacttccccgaaccggtgacggtgtcgtggaactcaggggccctgaccagcggcgtgcacaccttcccggctgtcctacagtcctcaggactctactccctcagcagcgtggtgaccgtgccctccagcagcttgggcacccagacctacatctgcaacgtgaatcacaagcccagcaacaccaaggtggacaagaaagttgagcccaaatcttgtgacaaaactcacacatgcccaccgtgcccagcacctgaactcctggggggaccgtcagtcttcctcttccccccaaaacccaaggacaccctcatgatctcccggacccctgaggtcacatgcgtggtggtggacgtgagccacgaagaccctgaggtcaagttcaactggtacgtggacggcgtggaggtgcataatgccaagacaaagccgcgggaggagcagtacaacagcacgtaccgtgtggtcagcgtcctcaccgtcctgcaccaggactggctgaatggcaaggagtacaagtgcaaggtctccaacaaagccctcccagcccccatcgagaaaaccatctccaaagccaaagggcagccccgagaaccacaggtgtacaccctgcccccatcccgggaggagatgaccaagaaccaggtcagcctgacctgcctggtcaaaggcttctatcccagcgacatcgccgtggagtgggagagcaatgggcagccggagaacaactacaagaccacgcctcccgtgctggactccgacggctccttcttcctctatagcaagctcaccgtggacaagagcaggtggcagcaggggaacgtcttctcatgctccgtgatgcatgaggctctgcacaaccactacacgcagaagagcctctccctgtctccgggtaaatga

SEQ ID NO: 654 - protein, 450 aa, artificial
  16C1 HC
QVQLQESGPGLVKPSETLSLTCTVSGGSISGYYWSWIRQPPGKGLEWIGYIYYIGSTNYNPSLKSRVTMSIDTSKNQFSLTLSSLTAADTAVYFCARDGSSGWYRWFDPWGQGTLVTVSSASTKGPSVFPLAPSSKSTSGGTAALGCLVKDYFPEPVTVSWNSGALTSGVHTFPAVLQSSGLYSLSSVVTVPSSSLGTQTYICNVNHKPSNTKVDKKVEPKSCDKTHTCPPCPAPELLGGPSVFLFPPKPKDTLMISRTPEVTCVVVDVSHEDPEVKFNWYVDGVEVHNAKTKPREEQYNSTYRVVSVLTVLHQDWLNGKEYKCKVSNKALPAPIEKTISKAKGQPREPQVYTLPPSREEMTKNQVSLTCLVKGFYPSDIAVEWESNGQPENNYKTTPPVLDSDGSFFLYSKLTVDKSRWQQGNVFSCSVMHEALHNHYTQKSLSLSPGK

SEQ ID NO: 655 - DNA, 1359 bp, artificial
  17H8 HC
caggtgcagctgcaggagtcgggcccaggactggtgaagccttcggagaccctgtccctcacgtgcactgtctctggtggctccatcaatagttactactggagctggatccggcagcccccagggaagggactggagtggattgggtatatctattacattgggagcaccaactacaacccctccctcaagagtcgcgtcaccatatcagtagacacgtccaagaaccagttctccctgaagctgagctctgtgaccgctgcggacacggccctgtattactgtgcgagagattcccggtatagaagtggctggtacgatgcttttgatatctggggccaagggacaatggtcaccgtctcttcagcttccaccaagggcccatccgtcttccccctggcgccctcctccaagagcacctctgggggcacagcggccctgggctgcctggtcaaggactacttccccgaaccggtgacggtgtcgtggaactcaggggccctgaccagcggcgtgcacaccttcccggctgtcctacagtcctcaggactctactccctcagcagcgtggtgaccgtgccctccagcagcttgggcacccagacctacatctgcaacgtgaatcacaagcccagcaacaccaaggtggacaagaaagttgagcccaaatcttgtgacaaaactcacacatgcccaccgtgcccagcacctgaactcctggggggaccgtcagtcttcctcttccccccaaaacccaaggacaccctcatgatctcccggacccctgaggtcacatgcgtggtggtggacgtgagccacgaagaccctgaggtcaagttcaactggtacgtggacggcgtggaggtgcataatgccaagacaaagccgcgggaggagcagtacaacagcacgtaccgtgtggtcagcgtcctcaccgtcctgcaccaggactggctgaatggcaaggagtacaagtgcaaggtctccaacaaagccctcccagcccccatcgagaaaaccatctccaaagccaaagggcagccccgagaaccacaggtgtacaccctgcccccatcccgggaggagatgaccaagaaccaggtcagcctgacctgcctggtcaaaggcttctatcccagcgacatcgccgtggagtgggagagcaatgggcagccggagaacaactacaagaccacgcctcccgtgctggactccgacggctccttcttcctctatagcaagctcaccgtggacaagagcaggtggcagcaggggaacgtcttctcatgctccgtgatgcatgaggctctgcacaaccactacacgcagaagagcctctccctgtctccgggtaaatga

SEQ ID NO: 656 - protein, 452 aa, artificial
  17H8 HC
QVQLQESGPGLVKPSETLSLTCTVSGGSINSYYWSWIRQPPGKGLEWIGYIYYIGSTNYNPSLKSRVTISVDTSKNQFSLKLSSVTAADTALYYCARDSRYRSGWYDAFDIWGQGTMVTVSSASTKGPSVFPLAPSSKSTSGGTAALGCLVKDYFPEPVTVSWNSGALTSGVHTFPAVLQSSGLYSLSSVVTVPSSSLGTQTYICNVNHKPSNTKVDKKVEPKSCDKTHTCPPCPAPELLGGPSVFLFPPKPKDTLMISRTPEVTCVVVDVSHEDPEVKFNWYVDGVEVHNAKTKPREEQYNSTYRVVSVLTVLHQDWLNGKEYKCKVSNKALPAPIEKTISKAKGQPREPQVYTLPPSREEMTKNQVSLTCLVKGFYPSDIAVEWESNGQPENNYKTTPPVLDSDGSFFLYSKLTVDKSRWQQGNVFSCSVMHEALHNHYTQKSLSLSPGK

SEQ ID NO: 657 - DNA, 1353 bp, artificial
  19B5 HC
caggtgcagttggtgcagtctggggctgaggtgaagaagcctggggcctcagtgaaggtttcctgcaaggtttctggatacaccttcaccagctactttattcactgggtgcgccaggcccctggacaagggcttgaatggatgggaattatcaaccctattagtgttagcacaagctacgcacagaagttccagggcagagtcaccatgaccagggacacgtccacgagcacagtcttcatggagctgagcagcctgagatctgaggacacggccgtgtattactgtgcgcgaggggggatacagctatggttacatttggactactggggccagggaaccctggtcaccgtctcctcagcttccaccaagggcccatccgtcttccccctggcgccctcctccaagagcacctctgggggcacagcggccctgggctgcctggtcaaggactacttccccgaaccggtgacggtgtcgtggaactcaggggccctgaccagcggcgtgcacaccttcccggctgtcctacagtcctcaggactctactccctcagcagcgtggtgaccgtgccctccagcagcttgggcacccagacctacatctgcaacgtgaatcacaagcccagcaacaccaaggtggacaagaaagttgagcccaaatcttgtgacaaaactcacacatgcccaccgtgcccagcacctgaactcctggggggaccgtcagtcttcctcttccccccaaaacccaaggacaccctcatgatctcccggacccctgaggtcacatgcgtggtggtggacgtgagccacgaagaccctgaggtcaagttcaactggtacgtggacggcgtggaggtgcataatgccaagacaaagccgcgggaggagcagtacaacagcacgtaccgtgtggtcagcgtcctcaccgtcctgcaccaggactggctgaatggcaaggagtacaagtgcaaggtctccaacaaagccctcccagcccccatcgagaaaaccatctccaaagccaaagggcagccccgagaaccacaggtgtacaccctgcccccatcccgggaggagatgaccaagaaccaggtcagcctgacctgcctggtcaaaggcttctatcccagcgacatcgccgtggagtgggagagcaatgggcagccggagaacaactacaagaccacgcctcccgtgctggactccgacggctccttcttcctctatagcaagctcaccgtggacaagagcaggtggcagcaggggaacgtcttctcatgctccgtgatgcatgaggctctgcacaaccactacacgcagaagagcctctccctgtctccgggtaaatga

SEQ ID NO: 658 - protein, 450 aa, artificial
  19B5 HC
QVQLVQSGAEVKKPGASVKVSCKVSGYTFTSYFIHWVRQAPGQGLEWMGIINPISVSTSYAQKFQGRVTMTRDTSTSTVFMELSSLRSEDTAVYYCARGGIQLWLHLDYWGQGTLVTVSSASTKGPSVFPLAPSSKSTSGGTAALGCLVKDYFPEPVTVSWNSGALTSGVHTFPAVLQSSGLYSLSSVVTVPSSSLGTQTYICNVNHKPSNTKVDKKVEPKSCDKTHTCPPCPAPELLGGPSVFLFPPKPKDTLMISRTPEVTCVVVDVSHEDPEVKFNWYVDGVEVHNAKTKPREEQYNSTYRVVSVLTVLHQDWLNGKEYKCKVSNKALPAPIEKTISKAKGQPREPQVYTLPPSREEMTKNQVSLTCLVKGFYPSDIAVEWESNGQPENNYKTTPPVLDSDGSFFLYSKLTVDKSRWQQGNVFSCSVMHEALHNHYTQKSLSLSPGK

SEQ ID NO: 659 - DNA, 1353 bp, artificial
  20D3 HC
caggtgcagctggtgcagtctggggctgaggtgaagaagcctggggcctcagtgaaggtttcctgcaaggtttctggatacaccttcaccagctactttattcactgggtgcgccaggcccctggacaagggcttgagtggatgggaataatcaaccctattagtgttagcacaagctacgcacagaagttccagggcagagtcaccatgaccagggacacgtccacgagcacagtcttcatggagctgagcagcctgagatctgaggacacggccgtgtattactgtgcgcgaggggggatacagctatggttacattttgactactggggccagggaaccctggtcaccgtctcctcagcttccaccaagggcccatccgtcttccccctggcgccctcctccaagagcacctctgggggcacagcggccctgggctgcctggtcaaggactacttccccgaaccggtgacggtgtcgtggaactcaggggccctgaccagcggcgtgcacaccttcccggctgtcctacagtcctcaggactctactccctcagcagcgtggtgaccgtgccctccagcagcttgggcacccagacctacatctgcaacgtgaatcacaagcccagcaacaccaaggtggacaagaaagttgagcccaaatcttgtgacaaaactcacacatgcccaccgtgcccagcacctgaactcctggggggaccgtcagtcttcctcttccccccaaaacccaaggacaccctcatgatctcccggacccctgaggtcacatgcgtggtggtggacgtgagccacgaagaccctgaggtcaagttcaactggtacgtggacggcgtggaggtgcataatgccaagacaaagccgcgggaggagcagtacaacagcacgtaccgtgtggtcagcgtcctcaccgtcctgcaccaggactggctgaatggcaaggagtacaagtgcaaggtctccaacaaagccctcccagcccccatcgagaaaaccatctccaaagccaaagggcagccccgagaaccacaggtgtacaccctgcccccatcccgggaggagatgaccaagaaccaggtcagcctgacctgcctggtcaaaggcttctatcccagcgacatcgccgtggagtgggagagcaatgggcagccggagaacaactacaagaccacgcctcccgtgctggactccgacggctccttcttcctctatagcaagctcaccgtggacaagagcaggtggcagcaggggaacgtcttctcatgctccgtgatgcatgaggctctgcacaaccactacacgcagaagagcctctccctgtctccgggtaaatga

SEQ ID NO: 660 - protein, 450 aa, artificial
  20D3 HC
QVQLVQSGAEVKKPGASVKVSCKVSGYTFTSYFIHWVRQAPGQGLEWMGIINPISVSTSYAQKFQGRVTMTRDTSTSTVFMELSSLRSEDTAVYYCARGGIQLWLHFDYWGQGTLVTVSSASTKGPSVFPLAPSSKSTSGGTAALGCLVKDYFPEPVTVSWNSGALTSGVHTFPAVLQSSGLYSLSSVVTVPSSSLGTQTYICNVNHKPSNTKVDKKVEPKSCDKTHTCPPCPAPELLGGPSVFLFPPKPKDTLMISRTPEVTCVVVDVSHEDPEVKFNWYVDGVEVHNAKTKPREEQYNSTYRVVSVLTVLHQDWLNGKEYKCKVSNKALPAPIEKTISKAKGQPREPQVYTLPPSREEMTKNQVSLTCLVKGFYPSDIAVEWESNGQPENNYKTTPPVLDSDGSFFLYSKLTVDKSRWQQGNVFSCSVMHEALHNHYTQKSLSLSPGK

SEQ ID NO: 661 - DNA, 1353 bp, artificial
  22D1 HC
caggtgcagctggtgcagtctggggctgaggtgaagaagcctggggcctcagtgagggtttcctgcaaggtttctggatacaccttcaccagctactttattcactgggtacgccaggcccctggacaagggcttgagtggatgggaataatcaaccctattagtgttagcacaagctacgcacagaagttccagggcagagtcaccatgaccagggacacgtccacgagcacagtcttcatggagctgagcagcctgagatctgaggacacggccgtgtattactgtgcgcgaggggggatacagctatggttacatttggactactggggccagggaaccctggtcaccgtctcctcagcttccaccaagggcccatccgtcttccccctggcgccctcctccaagagcacctctgggggcacagcggccctgggctgcctggtcaaggactacttccccgaaccggtgacggtgtcgtggaactcaggggccctgaccagcggcgtgcacaccttcccggctgtcctacagtcctcaggactctactccctcagcagcgtggtgaccgtgccctccagcagcttgggcacccagacctacatctgcaacgtgaatcacaagcccagcaacaccaaggtggacaagaaagttgagcccaaatcttgtgacaaaactcacacatgcccaccgtgcccagcacctgaactcctggggggaccgtcagtcttcctcttccccccaaaacccaaggacaccctcatgatctcccggacccctgaggtcacatgcgtggtggtggacgtgagccacgaagaccctgaggtcaagttcaactggtacgtggacggcgtggaggtgcataatgccaagacaaagccgcgggaggagcagtacaacagcacgtaccgtgtggtcagcgtcctcaccgtcctgcaccaggactggctgaatggcaaggagtacaagtgcaaggtctccaacaaagccctcccagcccccatcgagaaaaccatctccaaagccaaagggcagccccgagaaccacaggtgtacaccctgcccccatcccgggaggagatgaccaagaaccaggtcagcctgacctgcctggtcaaaggcttctatcccagcgacatcgccgtggagtgggagagcaatgggcagccggagaacaactacaagaccacgcctcccgtgctggactccgacggctccttcttcctctatagcaagctcaccgtggacaagagcaggtggcagcaggggaacgtcttctcatgctccgtgatgcatgaggctctgcacaaccactacacgcagaagagcctctccctgtctccgggtaaatga

SEQ ID NO: 662 - protein, 450 aa, artificial
  22D1 HC
QVQLVQSGAEVKKPGASVRVSCKVSGYTFTSYFIHWVRQAPGQGLEWMGIINPISVSTSYAQKFQGRVTMTRDTSTSTVFMELSSLRSEDTAVYYCARGGIQLWLHLDYWGQGTLVTVSSASTKGPSVFPLAPSSKSTSGGTAALGCLVKDYFPEPVTVSWNSGALTSGVHTFPAVLQSSGLYSLSSVVTVPSSSLGTQTYICNVNHKPSNTKVDKKVEPKSCDKTHTCPPCPAPELLGGPSVFLFPPKPKDTLMISRTPEVTCVVVDVSHEDPEVKFNWYVDGVEVHNAKTKPREEQYNSTYRVVSVLTVLHQDWLNGKEYKCKVSNKALPAPIEKTISKAKGQPREPQVYTLPPSREEMTKNQVSLTCLVKGFYPSDIAVEWESNGQPENNYKTTPPVLDSDGSFFLYSKLTVDKSRWQQGNVFSCSVMHEALHNHYTQKSLSLSPGK

SEQ ID NO: 663 - DNA, 1356 bp, artificial
  22G10 HC
gaggtgcaactgttggagtctgggggaggcttggtacagcctggggggtccctgagactctcctgtgcagcctctggattcacctttagcagttatgccatgaactgggtccgccaggctccagggaaggggctggagtgggtctcaactattagtggtggtggtgctaacacatactacgcagactccgtgaagggccggttcaccatctccagtgacaattccaagagcacgctgtatctgcaaatgaacagcctgagagccgcggacacggccgtatatcactgtgcgaaagggggaatggggggatactactacggtatggacgtctggggccaagggaccacggtcaccgtctcctcagcttccaccaagggcccatccgtcttccccctggcgccctcctccaagagcacctctgggggcacagcggccctgggctgcctggtcaaggactacttccccgaaccggtgacggtgtcgtggaactcaggggccctgaccagcggcgtgcacaccttcccggctgtcctacagtcctcaggactctactccctcagcagcgtggtgaccgtgccctccagcagcttgggcacccagacctacatctgcaacgtgaatcacaagcccagcaacaccaaggtggacaagaaagttgagcccaaatcttgtgacaaaactcacacatgcccaccgtgcccagcacctgaactcctggggggaccgtcagtcttcctcttccccccaaaacccaaggacaccctcatgatctcccggacccctgaggtcacatgcgtggtggtggacgtgagccacgaagaccctgaggtcaagttcaactggtacgtggacggcgtggaggtgcataatgccaagacaaagccgcgggaggagcagtacaacagcacgtaccgtgtggtcagcgtcctcaccgtcctgcaccaggactggctgaatggcaaggagtacaagtgcaaggtctccaacaaagccctcccagcccccatcgagaaaaccatctccaaagccaaagggcagccccgagaaccacaggtgtacaccctgcccccatcccgggaggagatgaccaagaaccaggtcagcctgacctgcctggtcaaaggcttctatcccagcgacatcgccgtggagtgggagagcaatgggcagccggagaacaactacaagaccacgcctcccgtgctggactccgacggctccttcttcctctatagcaagctcaccgtggacaagagcaggtggcagcaggggaacgtcttctcatgctccgtgatgcatgaggctctgcacaaccactacacgcagaagagcctctccctgtctccgggtaaatga

SEQ ID NO: 664 - protein, 451 aa, artificial
  22G10 HC
EVQLLESGGGLVQPGGSLRLSCAASGFTFSSYAMNWVRQAPGKGLEWVSTISGGGANTYYADSVKGRFTISSDNSKSTLYLQMNSLRAADTAVYHCAKGGMGGYYYGMDVWGQGTTVTVSSASTKGPSVFPLAPSSKSTSGGTAALGCLVKDYFPEPVTVSWNSGALTSGVHTFPAVLQSSGLYSLSSVVTVPSSSLGTQTYICNVNHKPSNTKVDKKVEPKSCDKTHTCPPCPAPELLGGPSVFLFPPKPKDTLMISRTPEVTCVVVDVSHEDPEVKFNWYVDGVEVHNAKTKPREEQYNSTYRVVSVLTVLHQDWLNGKEYKCKVSNKALPAPIEKTISKAKGQPREPQVYTLPPSREEMTKNQVSLTCLVKGFYPSDIAVEWESNGQPENNYKTTPPVLDSDGSFFLYSKLTVDKSRWQQGNVFSCSVMHEALHNHYTQKSLSLSPGK

SEQ ID NO: 665 - DNA, 1368 bp, artificial
  23A10 HC
caggtgcagctggtggagtctgggggaggcgtggtccagcctgggaggtccctgagactctcctgtgcagcgtctggattcaccttcagtcgctatggcatacactgggtccgccaggctccaggcaaggggctggagtgggtggcagttatatggtatgatggaagtaataaatactatgcagactccgtgaagggccgattcaccatctccagagacaattccaagaacacgctgtatctgctaatgaacagcctgagagccgaggactcggctgtgtattactgtgcgagaagggccggtatacctggaactacgggctactactatggtatggacgtctggggccaagggaccacggtcaccgtctcctcagcttccaccaagggcccatccgtcttccccctggcgccctcctccaagagcacctctgggggcacagcggccctgggctgcctggtcaaggactacttccccgaaccggtgacggtgtcgtggaactcaggggccctgaccagcggcgtgcacaccttcccggctgtcctacagtcctcaggactctactccctcagcagcgtggtgaccgtgccctccagcagcttgggcacccagacctacatctgcaacgtgaatcacaagcccagcaacaccaaggtggacaagaaagttgagcccaaatcttgtgacaaaactcacacatgcccaccgtgcccagcacctgaactcctggggggaccgtcagtcttcctcttccccccaaaacccaaggacaccctcatgatctcccggacccctgaggtcacatgcgtggtggtggacgtgagccacgaagaccctgaggtcaagttcaactggtacgtggacggcgtggaggtgcataatgccaagacaaagccgcgggaggagcagtacaacagcacgtaccgtgtggtcagcgtcctcaccgtcctgcaccaggactggctgaatggcaaggagtacaagtgcaaggtctccaacaaagccctcccagcccccatcgagaaaaccatctccaaagccaaagggcagccccgagaaccacaggtgtacaccctgcccccatcccgggaggagatgaccaagaaccaggtcagcctgacctgcctggtcaaaggcttctatcccagcgacatcgccgtggagtgggagagcaatgggcagccggagaacaactacaagaccacgcctcccgtgctggactccgacggctccttcttcctctatagcaagctcaccgtggacaagagcaggtggcagcaggggaacgtcttctcatgctccgtgatgcatgaggctctgcacaaccactacacgcagaagagcctctccctgtctccgggtaaatga

SEQ ID NO: 666 - protein, 455 aa, artificial
  23A10 HC
QVQLVESGGGVVQPGRSLRLSCAASGFTFSRYGIHWVRQAPGKGLEWVAVIWYDGSNKYYADSVKGRFTISRDNSKNTLYLLMNSLRAEDSAVYYCARRAGIPGTTGYYYGMDVWGQGTTVTVSSASTKGPSVFPLAPSSKSTSGGTAALGCLVKDYFPEPVTVSWNSGALTSGVHTFPAVLQSSGLYSLSSVVTVPSSSLGTQTYICNVNHKPSNTKVDKKVEPKSCDKTHTCPPCPAPELLGGPSVFLFPPKPKDTLMISRTPEVTCVVVDVSHEDPEVKFNWYVDGVEVHNAKTKPREEQYNSTYRVVSVLTVLHQDWLNGKEYKCKVSNKALPAPIEKTISKAKGQPREPQVYTLPPSREEMTKNQVSLTCLVKGFYPSDIAVEWESNGQPENNYKTTPPVLDSDGSFFLYSKLTVDKSRWQQGNVFSCSVMHEALHNHYTQKSLSLSPGK

SEQ ID NO: 667 - DNA, 1353 bp, artificial
  25F8 HC
caggtgcagctggtgcagtctggggctgaggtgaagaagcctggggcctcagtgaaggtttcctgcaaggcatctggatacaccttcaccagctactatattcactgggtgcgccaggcccctggacaaggacttgagtggatgggaataatcaaccccagtggtggtagcacaaggtacgcacagaagttccagggcagagtcaccatgaccagggacacgtccacgagcacagtcttcatggagctgagcagcctgagatctgaggacacggccgtgtattactgtgcgcgagggggaatacagctatggttacattttgactactggggccagggaaccctggtcaccgtctcctcagcttccaccaagggcccatccgtcttccccctggcgccctcctccaagagcacctctgggggcacagcggccctgggctgcctggtcaaggactacttccccgaaccggtgacggtgtcgtggaactcaggggccctgaccagcggcgtgcacaccttcccggctgtcctacagtcctcaggactctactccctcagcagcgtggtgaccgtgccctccagcagcttgggcacccagacctacatctgcaacgtgaatcacaagcccagcaacaccaaggtggacaagaaagttgagcccaaatcttgtgacaaaactcacacatgcccaccgtgcccagcacctgaactcctggggggaccgtcagtcttcctcttccccccaaaacccaaggacaccctcatgatctcccggacccctgaggtcacatgcgtggtggtggacgtgagccacgaagaccctgaggtcaagttcaactggtacgtggacggcgtggaggtgcataatgccaagacaaagccgcgggaggagcagtacaacagcacgtaccgtgtggtcagcgtcctcaccgtcctgcaccaggactggctgaatggcaaggagtacaagtgcaaggtctccaacaaagccctcccagcccccatcgagaaaaccatctccaaagccaaagggcagccccgagaaccacaggtgtacaccctgcccccatcccgggaggagatgaccaagaaccaggtcagcctgacctgcctggtcaaaggcttctatcccagcgacatcgccgtggagtgggagagcaatgggcagccggagaacaactacaagaccacgcctcccgtgctggactccgacggctccttcttcctctatagcaagctcaccgtggacaagagcaggtggcagcaggggaacgtcttctcatgctccgtgatgcatgaggctctgcacaaccactacacgcagaagagcctctccctgtctccgggtaaatga

SEQ ID NO: 668 - protein, 450 aa, artificial
  25F8 HC
QVQLVQSGAEVKKPGASVKVSCKASGYTFTSYYIHWVRQAPGQGLEWMGIINPSGGSTRYAQKFQGRVTMTRDTSTSTVFMELSSLRSEDTAVYYCARGGIQLWLHFDYWGQGTLVTVSSASTKGPSVFPLAPSSKSTSGGTAALGCLVKDYFPEPVTVSWNSGALTSGVHTFPAVLQSSGLYSLSSVVTVPSSSLGTQTYICNVNHKPSNTKVDKKVEPKSCDKTHTCPPCPAPELLGGPSVFLFPPKPKDTLMISRTPEVTCVVVDVSHEDPEVKFNWYVDGVEVHNAKTKPREEQYNSTYRVVSVLTVLHQDWLNGKEYKCKVSNKALPAPIEKTISKAKGQPREPQVYTLPPSREEMTKNQVSLTCLVKGFYPSDIAVEWESNGQPENNYKTTPPVLDSDGSFFLYSKLTVDKSRWQQGNVFSCSVMHEALHNHYTQKSLSLSPGK

SEQ ID NO: 669 - DNA, 1353 bp, artificial
  25G10 HC
caggtgcagctgcaggagtcgggcccaggactggtgaagccttcggagaccctgtccctcacctgcactgtctctggtggctccatcagtggttactactggagctggatccggcagcccccagggaagggactggagtggattgggtatatctattacattgggagcaccaactacaacccctccctcaagagtcgagtcaccatgtcagtagacacgtccaagaaccagttctccctgaagctgagctctgtgaccgctgcggacacggccgtgtattactgtgcgagagatgggagcagtggctggtaccggtggttcgacccctggggccagggaaccctggtcaccgtctcctcagcttccaccaagggcccatccgtcttccccctggcgccctcctccaagagcacctctgggggcacagcggccctgggctgcctggtcaaggactacttccccgaaccggtgacggtgtcgtggaactcaggggccctgaccagcggcgtgcacaccttcccggctgtcctacagtcctcaggactctactccctcagcagcgtggtgaccgtgccctccagcagcttgggcacccagacctacatctgcaacgtgaatcacaagcccagcaacaccaaggtggacaagaaagttgagcccaaatcttgtgacaaaactcacacatgcccaccgtgcccagcacctgaactcctggggggaccgtcagtcttcctcttccccccaaaacccaaggacaccctcatgatctcccggacccctgaggtcacatgcgtggtggtggacgtgagccacgaagaccctgaggtcaagttcaactggtacgtggacggcgtggaggtgcataatgccaagacaaagccgcgggaggagcagtacaacagcacgtaccgtgtggtcagcgtcctcaccgtcctgcaccaggactggctgaatggcaaggagtacaagtgcaaggtctccaacaaagccctcccagcccccatcgagaaaaccatctccaaagccaaagggcagccccgagaaccacaggtgtacaccctgcccccatcccgggaggagatgaccaagaaccaggtcagcctgacctgcctggtcaaaggcttctatcccagcgacatcgccgtggagtgggagagcaatgggcagccggagaacaactacaagaccacgcctcccgtgctggactccgacggctccttcttcctctatagcaagctcaccgtggacaagagcaggtggcagcaggggaacgtcttctcatgctccgtgatgcatgaggctctgcacaaccactacacgcagaagagcctctccctgtctccgggtaaatga

SEQ ID NO: 670 - protein, 449 aa, artificial
  25G10 HC
QVQLQESGPGLVKPSETLSLTCTVSGGSISGYYWSWIRQPPGKGLEWIGYIYYIGSTNYNPSLKSRVTMSVDTSKNQFSLKLSSVTAADTAVYYCARDGSSGWYRWFDPWGQGTLVTVSSASTKGPSVFPLAPSSKSTSGGTAALGCLVKDYFPEPVTVSWNSGALTSGVHTFPAVLQSSGLYSLSSVVTVPSSSLGTQTYICNVNHKPSNTKVDKKVEPKSCDKTHTCPPCPAPELLGGPSVFLFPPKPKDTLMISRTPEVTCVVVDVSHEDPEVKFNWYVDGVEVHNAKTKPREEQYNSTYRVVSVLTVLHQDWLNGKEYKCKVSNKALPAPIEKTISKAKGQPREPQVYTLPPSREEMTKNQVSLTCLVKGFYPSDIAVEWESNGQPENNYKTTPPVLDSDGSFFLYSKLTVDKSRWQQGNVFSCSVMHEALHNHYTQKSLSLSPG

SEQ ID NO: 671 - DNA, 1353 bp, artificial
  26D1 HC
caggtgcagttggtgcagtctggggctgaggtgaagaagcctggggcctcagtgaaggtttcctgtaaggcatctagatacaccttcaccagctactatatgtcctgggtgcgacaggcccctggacaagggcttgagtggatgggaataatccaccctagtggtggtgacacaacctacgcacagaagttccagggcagagtcaccatgaccggggacacgtccacgagcacagtctacatggagctgagcagcctgagatctgaggacacggccgtgtattactgtgcgagaggggggataaaactatggttacattttgactattggggccagggaaccctggtcaccgtctcctcagcttccaccaagggcccatccgtcttccccctggcgccctcctccaagagcacctctgggggcacagcggccctgggctgcctggtcaaggactacttccccgaaccggtgacggtgtcgtggaactcaggggccctgaccagcggcgtgcacaccttcccggctgtcctacagtcctcaggactctactccctcagcagcgtggtgaccgtgccctccagcagcttgggcacccagacctacatctgcaacgtgaatcacaagcccagcaacaccaaggtggacaagaaagttgagcccaaatcttgtgacaaaactcacacatgcccaccgtgcccagcacctgaactcctggggggaccgtcagtcttcctcttccccccaaaacccaaggacaccctcatgatctcccggacccctgaggtcacatgcgtggtggtggacgtgagccacgaagaccctgaggtcaagttcaactggtacgtggacggcgtggaggtgcataatgccaagacaaagccgcgggaggagcagtacaacagcacgtaccgtgtggtcagcgtcctcaccgtcctgcaccaggactggctgaatggcaaggagtacaagtgcaaggtctccaacaaagccctcccagcccccatcgagaaaaccatctccaaagccaaagggcagccccgagaaccacaggtgtacaccctgcccccatcccgggaggagatgaccaagaaccaggtcagcctgacctgcctggtcaaaggcttctatcccagcgacatcgccgtggagtgggagagcaatgggcagccggagaacaactacaagaccacgcctcccgtgctggactccgacggctccttcttcctctatagcaagctcaccgtggacaagagcaggtggcagcaggggaacgtcttctcatgctccgtgatgcatgaggctctgcacaaccactacacgcagaagagcctctccctgtctccgggtaaatga

SEQ ID NO: 672 - protein, 450 aa, artificial
  26D1 HC
QVQLVQSGAEVKKPGASVKVSCKASRYTFTSYYMSWVRQAPGQGLEWMGIIHPSGGDTTYAQKFQGRVTMTGDTSTSTVYMELSSLRSEDTAVYYCARGGIKLWLHFDYWGQGTLVTVSSASTKGPSVFPLAPSSKSTSGGTAALGCLVKDYFPEPVTVSWNSGALTSGVHTFPAVLQSSGLYSLSSVVTVPSSSLGTQTYICNVNHKPSNTKVDKKVEPKSCDKTHTCPPCPAPELLGGPSVFLFPPKPKDTLMISRTPEVTCVVVDVSHEDPEVKFNWYVDGVEVHNAKTKPREEQYNSTYRVVSVLTVLHQDWLNGKEYKCKVSNKALPAPIEKTISKAKGQPREPQVYTLPPSREEMTKNQVSLTCLVKGFYPSDIAVEWESNGQPENNYKTTPPVLDSDGSFFLYSKLTVDKSRWQQGNVFSCSVMHEALHNHYTQKSLSLSPGK

SEQ ID NO: 673 - DNA, 1353 bp, artificial
  26F12 HC
caggtgcagttggtgcagtctggggctgaggtgaagaagcctggggcctcagtgaaggtttcctgcaaggcatctagatacaccttcaccaactactatatgtcctgggtgcgacaggcccctggacaagggcttgagtggatgggaataatcaaccctagtggtggtgactcaacctacgcacagaagttccagggcagactcaccatgaccggggacacgtccacgagcacagtctacatggagctgagcagcctgagatctgaggacacggccgtgtattactgtgcgagaggggggatacaactatggttacattttgactactggggccagggaaccctggtcaccgtctcctcagcttccaccaagggcccatccgtcttccccctggcgccctcctccaagagcacctctgggggcacagcggccctgggctgcctggtcaaggactacttccccgaaccggtgacggtgtcgtggaactcaggggccctgaccagcggcgtgcacaccttcccggctgtcctacagtcctcaggactctactccctcagcagcgtggtgaccgtgccctccagcagcttgggcacccagacctacatctgcaacgtgaatcacaagcccagcaacaccaaggtggacaagaaagttgagcccaaatcttgtgacaaaactcacacatgcccaccgtgcccagcacctgaactcctggggggaccgtcagtcttcctcttccccccaaaacccaaggacaccctcatgatctcccggacccctgaggtcacatgcgtggtggtggacgtgagccacgaagaccctgaggtcaagttcaactggtacgtggacggcgtggaggtgcataatgccaagacaaagccgcgggaggagcagtacaacagcacgtaccgtgtggtcagcgtcctcaccgtcctgcaccaggactggctgaatggcaaggagtacaagtgcaaggtctccaacaaagccctcccagcccccatcgagaaaaccatctccaaagccaaagggcagccccgagaaccacaggtgtacaccctgcccccatcccgggaggagatgaccaagaaccaggtcagcctgacctgcctggtcaaaggcttctatcccagcgacatcgccgtggagtgggagagcaatgggcagccggagaacaactacaagaccacgcctcccgtgctggactccgacggctccttcttcctctatagcaagctcaccgtggacaagagcaggtggcagcaggggaacgtcttctcatgctccgtgatgcatgaggctctgcacaaccactacacgcagaagagcctctccctgtctccgggtaaatga

SEQ ID NO: 674 - protein, 450 aa, artificial
  26F12 HC
QVQLVQSGAEVKKPGASVKVSCKASRYTFTNYYMSWVRQAPGQGLEWMGIINPSGGDSTYAQKFQGRLTMTGDTSTSTVYMELSSLRSEDTAVYYCARGGIQLWLHFDYWGQGTLVTVSSASTKGPSVFPLAPSSKSTSGGTAALGCLVKDYFPEPVTVSWNSGALTSGVHTFPAVLQSSGLYSLSSVVTVPSSSLGTQTYICNVNHKPSNTKVDKKVEPKSCDKTHTCPPCPAPELLGGPSVFLFPPKPKDTLMISRTPEVTCVVVDVSHEDPEVKFNWYVDGVEVHNAKTKPREEQYNSTYRVVSVLTVLHQDWLNGKEYKCKVSNKALPAPIEKTISKAKGQPREPQVYTLPPSREEMTKNQVSLTCLVKGFYPSDIAVEWESNGQPENNYKTTPPVLDSDGSFFLYSKLTVDKSRWQQGNVFSCSVMHEALHNHYTQKSLSLSPGK

SEQ ID NO: 675 - DNA, 639 bp, artificial
  2G6 LC
tcctatgaactgactcagccaccctcagtgtccgtgtccccaggacagacagccagcatcacctgctctggagataggttgggggaaaaatatacttgctggtatcagcagaggccaggccagtcccctttgctggtcatctatcaagataccaagcggccctcagggatccctgagcgattctctggctccaactctggtaacacagccactctgaccatcagcgggacccaggctatggatgaggctgactattactgtcaggcgtgggacagcagcactgtggtattcggcggagggaccaagctgaccgtcctaggtcagcccaaggccaaccccactgtcactctgttcccgccctcctctgaggagctccaagccaacaaggccacactagtgtgtctgatcagtgacttctacccgggagctgtgacagtggcctggaaggcagatggcagccccgtcaaggcgggagtggagaccaccaaaccctccaaacagagcaacaacaagtacgcggccagcagctacctgagcctgacgcccgagcagtggaagtcccacagaagctacagctgccaggtcacgcatgaagggagcaccgtggagaagacagtggcccctacagaatgttcatga

SEQ ID NO: 676 - protein, 212 aa, artificial
  2G6 LC
SYELTQPPSVSVSPGQTASITCSGDRLGEKYTCWYQQRPGQSPLLVIYQDTKRPSGIPERFSGSNSGNTATLTISGTQAMDEADYYCQAWDSSTVVFGGGTKLTVLGQPKANPTVTLFPPSSEELQANKATLVCLISDFYPGAVTVAWKADGSPVKAGVETTKPSKQSNNKYAASSYLSLTPEQWKSHRSYSCQVTHEGSTVEKTVAPTECS

SEQ ID NO: 677 - DNA, 645 bp, artificial
  4A2 LC
gaaattgtgttgacgcagtctccaggcaccctgtctttgtctccaggggaaagagccaccctctcctgcagggccagtcggaatattagcagcagctacttagcctggtaccagcagaaacctggccaggctcccaggctcctcatctatggtccatccagcagggccactggcatcccagacaggttcagtggcagtgggtctgggacagacttcactctcaccatcagcagactggagcctgaagattttacagtgtattactgtcagcagtatggtagctcattcactttcggccctgggaccaaagtggatatcaaacgtacggtggctgcaccatctgtcttcatcttcccgccatctgatgagcagttgaaatctggaactgcctctgttgtgtgcctgctgaataacttctatcccagagaggccaaagtacagtggaaggtggataacgccctccaatcgggtaactcccaggagagtgtcacagagcaggacagcaaggacagcacctacagcctcagcagcaccctgacgctgagcaaagcagactacgagaaacacaaagtctacgcctgcgaagtcacccatcagggcctgagctcgcccgtcacaaagagcttcaacaggggagagtgttga

SEQ ID NO: 678 - protein, 214 aa, artificial
  4A2 LC
EIVLTQSPGTLSLSPGERATLSCRASRNISSSYLAWYQQKPGQAPRLLIYGPSSRATGIPDRFSGSGSGTDFTLTISRLEPEDFTVYYCQQYGSSFTFGPGTKVDIKRTVAAPSVFIFPPSDEQLKSGTASVVCLLNNFYPREAKVQWKVDNALQSGNSQESVTEQDSKDSTYSLSSTLTLSKADYEKHKVYACEVTHQGLSSPVTKSFNRGEC

SEQ ID NO: 679 - DNA, 654 bp, artificial
  4A9 LC
cagtctgtgctgacgcagccgccctcagtgtctggggccccaggacagagggtcaccatctcctgcactgggagcagctccaacatcgggacaggttatgctgtacactggtaccagcagtttccaggaacagcccccaaactcctcatctatggtaacaacaatcggccctcaggggttcctgaccgattctctggctccaagtctggcacctcagcctccctggccatcactgggctccaggctgaggatgaggctgattattactgccagtcctatgacagcagactgagtggttgggtgttcggcggagggaccaagctgaccgtcctaggtcagcccaaggccaaccccactgtcactctgttcccgccctcctctgaggagctccaagccaacaaggccacactagtgtgtctgatcagtgacttctacccgggagctgtgacagtggcctggaaggcagatggcagccccgtcaaggcgggagtggagaccaccaaaccctccaaacagagcaacaacaagtacgcggccagcagctacctgagcctgacgcccgagcagtggaagtcccacagaagctacagctgccaggtcacgcatgaagggagcaccgtggagaagacagtggcccctacagaatgttcatga

SEQ ID NO: 680 - protein, 217 aa, artificial
  4A9 LC
QSVLTQPPSVSGAPGQRVTISCTGSSSNIGTGYAVHWYQQFPGTAPKLLIYGNNNRPSGVPDRFSGSKSGTSASLAITGLQAEDEADYYCQSYDSRLSGWVFGGGTKLTVLGQPKANPTVTLFPPSSEELQANKATLVCLISDFYPGAVTVAWKADGSPVKAGVETTKPSKQSNNKYAASSYLSLTPEQWKSHRSYSCQVTHEGSTVEKTVAPTECS

SEQ ID NO: 681 - DNA, 645 bp, artificial
  4B10 LC
gaaattgtattgacgcagtctccaggcaccctgtctttgtctccaggggaaagagccaccctctcctgcagggccagtcagagtgttagcaacacctacttagcctggtaccatcagagacctggccaggctcccaggctcctcatctatggtgcatccagcagggccactggcatcccagacagattcagtggcagtgggtctgggacagacttcgctctcaccatcagcagtctggagcctgaagattttgcagtgtattactgtcagcagtacagtaactcgtggacgttcggccaagggaccaaggtggaaatcaaacgaactgtggctgcaccatctgtcttcatcttcccgccatctgatgagcagttgaaatctggaactgcctctgttgtgtgcctgctgaataacttctatcccagagaggccaaagtacagtggaaggtggataacgccctccaatcgggtaactcccaggagagtgtcacagagcaggacagcaaggacagcacctacagcctcagcagcaccctgacgctgagcaaagcagactacgagaaacacaaagtctacgcctgcgaagtcacccatcagggcctgagctcgcccgtcacaaagagcttcaacaggggagagtgttga

SEQ ID NO: 682 - protein, 214 aa, artificial
  4B10 LC
EIVLTQSPGTLSLSPGERATLSCRASQSVSNTYLAWYHQRPGQAPRLLIYGASSRATGIPDRFSGSGSGTDFALTISSLEPEDFAVYYCQQYSNSWTFGQGTKVEIKRTVAAPSVFIFPPSDEQLKSGTASVVCLLNNFYPREAKVQWKVDNALQSGNSQESVTEQDSKDSTYSLSSTLTLSKADYEKHKVYACEVTHQGLSSPVTKSFNRGEC

SEQ ID NO: 683 - DNA, 645 bp, artificial
  4F3 LC
gaaattgtgttgacgcagtctccaggcaccctgtctttgtctccaggggaaagagccaccctctcctgcagggccagtcagagtgttagcagcagctacttagcctggtaccagcagaaacctggccaggctcccaggctcctcatctatggtgcatccagcagggccactggcatcccagacaggttcagtggcagtgggtctgggacagacttcactctcaccatcagcagactggaacctgaggattttgcagtgtattactgtcagcagtatggtagctcgtggacgttcggccaagggaccaaggtggaaatcaaacgtacggtggctgcaccatctgtcttcatcttcccgccatctgatgagcagttgaaatctggaactgcctctgttgtgtgcctgctgaataacttctatcccagagaggccaaagtacagtggaaggtggataacgccctccaatcgggtaactcccaggagagtgtcacagagcaggacagcaaggacagcacctacagcctcagcagcaccctgacgctgagcaaagcagactacgagaaacacaaagtctacgcctgcgaagtcacccatcagggcctgagctcgcccgtcacaaagagcttcaacaggggagagtgttga

SEQ ID NO: 684 - protein, 214 aa, artificial
  4F3 LC
EIVLTQSPGTLSLSPGERATLSCRASQSVSSSYLAWYQQKPGQAPRLLIYGASSRATGIPDRFSGSGSGTDFTLTISRLEPEDFAVYYCQQYGSSWTFGQGTKVEIKRTVAAPSVFIFPPSDEQLKSGTASVVCLLNNFYPREAKVQWKVDNALQSGNSQESVTEQDSKDSTYSLSSTLTLSKADYEKHKVYACEVTHQGLSSPVTKSFNRGEC

SEQ ID NO: 685 - DNA, 654 bp, artificial
  4F7 LC
cagtctgtgctgacgcagccgccctcagtgtctggggccccagggcagagggtcaccatctcctgcactgggagcagctccaatatcgggacaggttatgatgtacactggtatcagcagcttccaggaacagcccccaaactcctcatccatggtaacagcaatcggccctcaggggtccctgaccgattctctggctccaagtctggcacctcagcctccctggccatcactgggctccaggctgaggatgaggctgattattactgccagtcctatgacagcagtctgagtggttgggtgttcggcggagggaccaggttgaccgtcctaggtcagcccaaggccaaccccactgtcactctgttcccgccctcctctgaggagctccaagccaacaaggccacactagtgtgtctgatcagtgacttctacccgggagctgtgacagtggcctggaaggcagatggcagccccgtcaaggcgggagtggagaccaccaaaccctccaaacagagcaacaacaagtacgcggccagcagctacctgagcctgacgcccgagcagtggaagtcccacagaagctacagctgccaggtcacgcatgaagggagcaccgtggagaagacagtggcccctacagaatgttcatga

SEQ ID NO: 686 - protein, 217 aa, artificial
  4F7 LC
QSVLTQPPSVSGAPGQRVTISCTGSSSNIGTGYDVHWYQQLPGTAPKLLIHGNSNRPSGVPDRFSGSKSGTSASLAITGLQAEDEADYYCQSYDSSLSGWVFGGGTRLTVLGQPKANPTVTLFPPSSEELQANKATLVCLISDFYPGAVTVAWKADGSPVKAGVETTKPSKQSNNKYAASSYLSLTPEQWKSHRSYSCQVTHEGSTVEKTVAPTECS

SEQ ID NO: 687 - DNA, 648 bp, artificial
  16A4 LC
gaaattgtgttgacgcagtctccaggcaccctgtctttgtctccaggggaaagagccaccctctcctgcagggccagtcagagtgttagcagcagttatttagcctggtaccagcagaaacctggccaggctcccaggctcctcatctatggtacatccagcagggccactggcatcccagacaggttcagtggcagtgggtctgggacagacttcactctcaccatcagcagactggagcctgaagattttgcagtgtattattgtcagcagtacggtagctcacctttcactttcggcggagggaccaaggtggagatcaaacgaactgtggctgcaccatctgtcttcatcttcccgccatctgatgagcagttgaaatctggtaccgcctctgttgtgtgcctgctgaataacttctatcccagagaggccaaagtacagtggaaggtggataacgccctccaatcgggtaactcccaggagagtgtcacagagcaggacagcaaggacagcacctacagcctcagcagcaccctgacgctgagcaaagcagactacgagaaacacaaagtctacgcctgcgaagtcacccatcagggcctgagctcgcccgtcacaaagagcttcaacaggggagagtgttga

SEQ ID NO: 688 - protein, 215 aa, artificial
  16A4 LC
EIVLTQSPGTLSLSPGERATLSCRASQSVSSSYLAWYQQKPGQAPRLLIYGTSSRATGIPDRFSGSGSGTDFTLTISRLEPEDFAVYYCQQYGSSPFTFGGGTKVEIKRTVAAPSVFIFPPSDEQLKSGTASVVCLLNNFYPREAKVQWKVDNALQSGNSQESVTEQDSKDSTYSLSSTLTLSKADYEKHKVYACEVTHQGLSSPVTKSFNRGEC

SEQ ID NO: 689 - DNA, 648 bp, artificial
  16C1 LC
gaaattgtgttgacgcagtctccaggcaccctgtctttgtctccaggggaaagagccaccctctcctgcagggccagccagagtgttagcagcagctacttagcctggtaccagcagaaacctggccaggctcccaggctcctcatctttggtgcatccagcagggccactggcatcccagacaggttcagtggcagtgggtctgggacagacttcactctcaccatcagcggactggagcctgaagattttgcagtgtatcactgtcagcagtatggtaactcaccgctcactttcggcggagggaccaaggtggagatcaaacgaactgtggctgcaccatctgtcttcatcttcccgccatctgatgagcagttgaaatctggtaccgcctctgttgtgtgcctgctgaataacttctatcccagagaggccaaagtacagtggaaggtggataacgccctccaatcgggtaactcccaggagagtgtcacagagcaggacagcaaggacagcacctacagcctcagcagcaccctgacgctgagcaaagcagactacgagaaacacaaagtctacgcctgcgaagtcacccatcagggcctgagctcgcccgtcacaaagagcttcaacaggggagagtgttga

SEQ ID NO: 690 - protein, 215 aa, artificial
  16C1 LC
EIVLTQSPGTLSLSPGERATLSCRASQSVSSSYLAWYQQKPGQAPRLLIFGASSRATGIPDRFSGSGSGTDFTLTISGLEPEDFAVYHCQQYGNSPLTFGGGTKVEIKRTVAAPSVFIFPPSDEQLKSGTASVVCLLNNFYPREAKVQWKVDNALQSGNSQESVTEQDSKDSTYSLSSTLTLSKADYEKHKVYACEVTHQGLSSPVTKSFNRGEC

SEQ ID NO: 691 - DNA, 648 bp, artificial
  17H8 LC
gacattgtattgacgcagtctccaggcaccctgtctttgtctccaggggaaagagccaccctctcctgcagggccagtcagagtgttgccggcagctacctagcctggtaccagcagaaacctggccaggctcccaggctcctcatctctggtgcatccagcagggccactggcatcccagacaggttcagtggcagtgggtctgggacagacttcactctcaccatcagcagactggagcctgaagattttgcagtgtattactgtcagcagtatggtaaatcaccgatcaccttcggccaagggacacgactggagatgaaaggaactgtggctgcaccatctgtcttcatcttcccgccatctgatgagcagttgaaatctggtaccgcctctgttgtgtgcctgctgaataacttctatcccagagaggccaaagtacagtggaaggtggataacgccctccaatcgggtaactcccaggagagtgtcacagagcaggacagcaaggacagcacctacagcctcagcagcaccctgacgctgagcaaagcagactacgagaaacacaaagtctacgcctgcgaagtcacccatcagggcctgagctcgcccgtcacaaagagcttcaacaggggagagtgttga

SEQ ID NO: 692 - protein, 215 aa, artificial
  17H8 LC
DIVLTQSPGTLSLSPGERATLSCRASQSVAGSYLAWYQQKPGQAPRLLISGASSRATGIPDRFSGSGSGTDFTLTISRLEPEDFAVYYCQQYGKSPITFGQGTRLEMKGTVAAPSVFIFPPSDEQLKSGTASVVCLLNNFYPREAKVQWKVDNALQSGNSQESVTEQDSKDSTYSLSSTLTLSKADYEKHKVYACEVTHQGLSSPVTKSFNRGEC

SEQ ID NO: 693 - DNA, 651 bp, artificial
  19B5 LC
cagtctgcgctgactcagccaccctcaacgactgggacccccgggcagagggtcaccatctcttgttctggaagcaggtccaacatcggaagcaattttgtaaactggtacaagcagctcccaggaacggcccccaaagtcctcatctatactaataatcagcggccctcaggggtccctgaccgattctctggctccaagtctggcacctcagcctccctggccatcagtgggctccagtctgaggatgagtctgattattactgcgcaacatgggatgacagtatgaatggttgggtgttcggcggagggaccaaactgaccgtcctaggtcagcccaaggctgccccctcggtcactctgttcccaccctcctctgaggagcttcaagccaacaaggccacactggtgtgtctcataagtgacttctacccgggagccgtgacagtggcctggaaggcagatagcagccccgtcaaggcgggagtggagaccaccacaccctccaaacaaagcaacaacaagtacgcggccagcagctatctgagcctgacgcctgagcagtggaagtcccacagaagctacagctgccaggtcacgcatgaagggagcaccgtggagaagacagtggcccctacagaatgttcatga

SEQ ID NO: 694 - protein, 216 aa, artificial
  19B5 LC
QSALTQPPSTTGTPGQRVTISCSGSRSNIGSNFVNWYKQLPGTAPKVLIYTNNQRPSGVPDRFSGSKSGTSASLAISGLQSEDESDYYCATWDDSMNGWVFGGGTKLTVLGQPKAAPSVTLFPPSSEELQANKATLVCLISDFYPGAVTVAWKADSSPVKAGVETTTPSKQSNNKYAASSYLSLTPEQWKSHRSYSCQVTHEGSTVEKTVAPTECS

SEQ ID NO: 695 - DNA, 651 bp, artificial
  20D3 LC
cagtctgcgctgactcagccaccctcagcgactgggacccccgggcagagggtcaccatctcttgttctggaagcagctccaacatcggaagcaattttgtaaactggtacaagcagctcccaggaacggcccccaaagtcctcatctatactaataatcagcggccctcaggggtccctgaccgattctctggctccaagtctggcacctcagcctccctggccatcagtgggctccagtctgaggatgagtctgattattactgtgcaacatgggatgacagcctgaatggttgggtgttcggcggagggaccaagctgaccgtcctaggtcagcccaaggctgccccctcggtcactctgttcccaccctcctctgaggagcttcaagccaacaaggccacactggtgtgtctcataagtgacttctacccgggagccgtgacagtggcctggaaggcagatagcagccccgtcaaggcgggagtggagaccaccacaccctccaaacaaagcaacaacaagtacgcggccagcagctatctgagcctgacgcctgagcagtggaagtcccacagaagctacagctgccaggtcacgcatgaagggagcaccgtggagaagacagtggcccctacagaatgttcatga

SEQ ID NO: 696 - protein, 216 aa, artificial
  20D3 LC
QSALTQPPSATGTPGQRVTISCSGSSSNIGSNFVNWYKQLPGTAPKVLIYTNNQRPSGVPDRFSGSKSGTSASLAISGLQSEDESDYYCATWDDSLNGWVFGGGTKLTVLGQPKAAPSVTLFPPSSEELQANKATLVCLISDFYPGAVTVAWKADSSPVKAGVETTTPSKQSNNKYAASSYLSLTPEQWKSHRSYSCQVTHEGSTVEKTVAPTECS

SEQ ID NO: 697 - DNA, 651 bp, artificial
  22D1 LC
cagtctgcgctgactcagccaccctcagcgactgggacccccgggcagagggtcaccatctcttgttctggaagcagctccaacatcggaagcaattttgtaaactggtacaagcagctcccaggaacggcccccaaagtcctcatctatactaataatcagcggccctcaggggtccctgaccgattctctggctccaagtctggcacctcagcctccctggccatcagtgggctccagtctgaggatgagtctgattattactgtgcaacatgggatgacagtatgaatggttgggtgttcggcggagggaccaagctgaccgtcctaggtcagcccaaggctgccccctcggtcactctgttcccaccctcctctgaggagcttcaagccaacaaggccacactggtgtgtctcataagtgacttctacccgggagccgtgacagtggcctggaaggcagatagcagccccgtcaaggcgggagtggagaccaccacaccctccaaacaaagcaacaacaagtacgcggccagcagctatctgagcctgacgcctgagcagtggaagtcccacagaagctacagctgccaggtcacgcatgaagggagcaccgtggagaagacagtggcccctacagaatgttcatga

SEQ ID NO: 698 - protein, 216 aa, artificial
  22D1 LC
QSALTQPPSATGTPGQRVTISCSGSSSNIGSNFVNWYKQLPGTAPKVLIYTNNQRPSGVPDRFSGSKSGTSASLAISGLQSEDESDYYCATWDDSMNGWVFGGGTKLTVLGQPKAAPSVTLFPPSSEELQANKATLVCLISDFYPGAVTVAWKADSSPVKAGVETTTPSKQSNNKYAASSYLSLTPEQWKSHRSYSCQVTHEGSTVEKTVAPTECS

SEQ ID NO: 699 - DNA, 645 bp, artificial
  22G10 LC
gaaatagtgatgacgcagtctccagtcaccctgtctctgtctctaggggaaagagccaccctctcctgcagggccagtcagagtattagcagcaacttagcctggttccagcagaaacctggccaggctcccagactcctcatctatggtgcatttaccagggccactggtatcccagccagggtcagtggcagtgggtctgggacagagttcactctcaccatcagcagcctgcagtctgaagattttgcagtttattactgtcagcagtataattactggccgctcactttcggcggagggaccaaggtggagatcaagcgaactgtggctgcaccatctgtcttcatcttcccgccatctgatgagcagttgaaatctggtaccgcctctgttgtgtgcctgctgaataacttctatcccagagaggccaaagtacagtggaaggtggataacgccctccaatcgggtaactcccaggagagtgtcacagagcaggacagcaaggacagcacctacagcctcagcagcaccctgacgctgagcaaagcagactacgagaaacacaaagtctacgcctgcgaagtcacccatcagggcctgagctcgcccgtcacaaagagcttcaacaggggagagtgttga

SEQ ID NO: 700 - protein, 214 aa, artificial
  22G10 LC
EIVMTQSPVTLSLSLGERATLSCRASQSISSNLAWFQQKPGQAPRLLIYGAFTRATGIPARVSGSGSGTEFTLTISSLQSEDFAVYYCQQYNYWPLTFGGGTKVEIKRTVAAPSVFIFPPSDEQLKSGTASVVCLLNNFYPREAKVQWKVDNALQSGNSQESVTEQDSKDSTYSLSSTLTLSKADYEKHKVYACEVTHQGLSSPVTKSFNRGEC

SEQ ID NO: 701 - DNA, 639 bp, artificial
  23A10 LC
tcctatgagctgactcagccaccctcagtgtccgtgtccccaggacagacagccagcatcacctgctctggagatagattgggggagaaatatgtttgctggtatcagcagaagccaggccagtcccctatactggtcatctatcaagataataagtggccctcagggatccctgagcgattctctggctccaactctgggaacacagccactctgaccatcagcgggacccaggctatggatgaggctgactattactgtcaggcgtgggacagcagcactgtggtattcggcggggggaccaagctgaccgtcctaggtcagcccaaggctgccccctcggtcactctgttcccaccctcctctgaggagcttcaagccaacaaggccacactggtgtgtctcataagtgacttctacccgggagccgtgacagtggcctggaaggcagatagcagccccgtcaaggcgggagtggagaccaccacaccctccaaacaaagcaacaacaagtacgcggccagcagctatctgagcctgacgcctgagcagtggaagtcccacagaagctacagctgccaggtcacgcatgaagggagcaccgtggagaagacagtggcccctacagaatgttcatga

SEQ ID NO: 702 - protein, 212 aa, artificial
  23A10 LC
SYELTQPPSVSVSPGQTASITCSGDRLGEKYVCWYQQKPGQSPILVIYQDNKWPSGIPERFSGSNSGNTATLTISGTQAMDEADYYCQAWDSSTVVFGGGTKLTVLGQPKAAPSVTLFPPSSEELQANKATLVCLISDFYPGAVTVAWKADSSPVKAGVETTTPSKQSNNKYAASSYLSLTPEQWKSHRSYSCQVTHEGSTVEKTVAPTECS

SEQ ID NO: 703 - DNA, 651 bp, artificial
  25F8 LC
cagtctgcgctgactcagccaccctcagcgactgggacccccgggcagagggtcaccatctcttgttctggaagcagctccaacatcggaaggaattttgtaaactggtataagcagctcccaggaacggcccccaaagtcctcatttatactaataatcagcggccctcaggggtccctgaccgattctctggctccaagtctggcacctcagcctccctggccatcagtgggctccagtctgaggatgagtctgattattactgtgcagcatgggatgacagcctgaatggttgggtgttcggcggagggaccaagctgaccgtcctaggtcagcccaaggctgccccctcggtcactctgttcccaccctcctctgaggagcttcaagccaacaaggccacactggtgtgtctcataagtgacttctacccgggagccgtgacagtggcctggaaggcagatagcagccccgtcaaggcgggagtggagaccaccacaccctccaaacaaagcaacaacaagtacgcggccagcagctatctgagcctgacgcctgagcagtggaagtcccacagaagctacagctgccaggtcacgcatgaagggagcaccgtggagaagacagtggcccctacagaatgttcatga

SEQ ID NO: 704 - protein, 216 aa, artificial
  25F8 LC
QSALTQPPSATGTPGQRVTISCSGSSSNIGRNFVNWYKQLPGTAPKVLIYTNNQRPSGVPDRFSGSKSGTSASLAISGLQSEDESDYYCAAWDDSLNGWVFGGGTKLTVLGQPKAAPSVTLFPPSSEELQANKATLVCLISDFYPGAVTVAWKADSSPVKAGVETTTPSKQSNNKYAASSYLSLTPEQWKSHRSYSCQVTHEGSTVEKTVAPTECS

SEQ ID NO: 705 - DNA, 648 bp, artificial
  25G10 LC
gaaattgtgttgacgcagtctccaggcaccctgtctttgtctccaggggaaagagccaccctctcctgcagggccagtcagagtgttagcagcagctacttagcctggtaccagcagaaacctggccaggctcccaggctcctcatctttggtgcatccagcagggccactggcatcccagacaggttcagtggcagtgggtctgggacagacttcactctcaccatcagcagactggagcctgaagattttgcagtgtatcactgtcagcagtatggtaactcaccgctcactttcggcggagggaccaaggtggagatcaaacgaactgtggctgcaccatctgtcttcatcttcccgccatctgatgagcagttgaaatctggtaccgcctctgttgtgtgcctgctgaataacttctatcccagagaggccaaagtacagtggaaggtggataacgccctccaatcgggtaactcccaggagagtgtcacagagcaggacagcaaggacagcacctacagcctcagcagcaccctgacgctgagcaaagcagactacgagaaacacaaagtctacgcctgcgaagtcacccatcagggcctgagctcgcccgtcacaaagagcttcaacaggggagagtgttga

SEQ ID NO: 706 - protein, 215 aa, artificial
  25G10 LC
EIVLTQSPGTLSLSPGERATLSCRASQSVSSSYLAWYQQKPGQAPRLLIFGASSRATGIPDRFSGSGSGTDFTLTISRLEPEDFAVYHCQQYGNSPLTFGGGTKVEIKRTVAAPSVFIFPPSDEQLKSGTASVVCLLNNFYPREAKVQWKVDNALQSGNSQESVTEQDSKDSTYSLSSTLTLSKADYEKHKVYACEVTHQGLSSPVTKSFNRGEC

SEQ ID NO: 707 - DNA, 651 bp, artificial
  26D1 LC
cactctgtgctgactcagtcaccctcagcgtctgggacccccggacagagggtcaccatctcttgttctggaagccgctccaacatcggaagtaattttgtaaactggtaccagcagctcccaggaacggcccccaaactcctcatctatactaataatcagcggccctcaggggtccctgaccgattctctggctccaagtctggcacctcagcctccctggccatcagtgggctccagtctgaggatgaggctgattattactgtgcagtatgggatgacagcctgaatggttgggtgttcggcggagggaccaagctgaccgtcctaggtcagcccaaggctgccccctcggtcactctgttcccaccctcctctgaggagcttcaagccaacaaggccacactggtgtgtctcataagtgacttctacccgggagccgtgacagtggcctggaaggcagatagcagccccgtcaaggcgggagtggagaccaccacaccctccaaacaaagcaacaacaagtacgcggccagcagctatctgagcctgacgcctgagcagtggaagtcccacagaagctacagctgccaggtcacgcatgaagggagcaccgtggagaagacagtggcccctacagaatgttcatga

SEQ ID NO: 708 - protein, 216 aa, artificial
  26D1 LC
HSVLTQSPSASGTPGQRVTISCSGSRSNIGSNFVNWYQQLPGTAPKLLIYTNNQRPSGVPDRFSGSKSGTSASLAISGLQSEDEADYYCAVWDDSLNGWVFGGGTKLTVLGQPKAAPSVTLFPPSSEELQANKATLVCLISDFYPGAVTVAWKADSSPVKAGVETTTPSKQSNNKYAASSYLSLTPEQWKSHRSYSCQVTHEGSTVEKTVAPTECS

SEQ ID NO: 709 - DNA, 651 bp, artificial
  26F12 LC
cagtctgtgctgactcagtcaccctcagcgtctgggacccccgggcagaaggtcaccatctcttgttctggaagccgctccaacatcggaagtaattttgtaaactggtaccagcagctcccaggaacggcccccaaactcctcatctatactaattatcagcggccctcaggggtccctgaccgattctctggctccaagtctggcacctcagcctccctggccatcagtgggctccagtctgaggatgaggctgattattactgtgcagtatgggatgacagcctgaatggttgggtgttcggcggagggaccaagctgaccgtcctaggtcagcccaaggctgccccctcggtcactctgttcccaccctcctctgaggagcttcaagccaacaaggccacactggtgtgtctcataagtgacttctacccgggagccgtgacagtggcctggaaggcagatagcagccccgtcaaggcgggagtggagaccaccacaccctccaaacaaagcaacaacaagtacgcggccagcagctatctgagcctgacgcctgagcagtggaagtcccacagaagctacagctgccaggtcacgcatgaagggagcaccgtggagaagacagtggcccctacagaatgttcatga

SEQ ID NO: 710 - protein, 216 aa, artificial
  26F12 LC
QSVLTQSPSASGTPGQKVTISCSGSRSNIGSNFVNWYQQLPGTAPKLLIYTNYQRPSGVPDRFSGSKSGTSASLAISGLQSEDEADYYCAVWDDSLNGWVFGGGTKLTVLGQPKAAPSVTLFPPSSEELQANKATLVCLISDFYPGAVTVAWKADSSPVKAGVETTTPSKQSNNKYAASSYLSLTPEQWKSHRSYSCQVTHEGSTVEKTVAPTECS

SEQ ID NO: 711 - protein, 449 aa, artificial; identical to SEQ ID NO: 648
  [hu anti-<huCDH19> 4F3 VH]::huIgG1z

SEQ ID NO: 712 - protein, 446 aa, artificial; identical to SEQ ID NO: 644
  HC [hu anti-<huCDH19> 4A9 VH]::huIgG1z

SEQ ID NO: 713 - protein, 449 aa, artificial; identical to SEQ ID NO: 646
  HC [hu anti-<huCDH19> 4B10 VH]::huIgG1z

SEQ ID NO: 714 - protein, 452 aa, artificial; identical to SEQ ID NO: 656
  HC [hu anti-<huCDH19> 17H8.2 VH]::huIgG1z

SEQ ID NO: 715 - protein, 450 aa, artificial; identical to SEQ ID NO: 654
  HC [hu anti-<huCDH19> 16C1.1 VH]::huIgG1z

SEQ ID NO: 716 - protein, 455 aa, artificial; identical to SEQ ID NO: 652
  HC [hu anti-<huCDH19> 16A4.1 VH]::huIgG1z

SEQ ID NO: 717 - protein, 451 aa, artificial; identical to SEQ ID NO: 664
  HC [hu anti-<huCDH19> 22G10.1 VH]::huIgG1z

SEQ ID NO: 718 - protein, 450 aa, artificial; identical to SEQ ID NO: 660
  HC [hu anti-<huCDH19> 20D3.1 VH]::huIgG1z

SEQ ID NO: 719 - protein, 450 aa, artificial; identical to SEQ ID NO: 662
  HC [hu anti-<huCDH19> 22D1.1 VH]::huIgG1z

SEQ ID NO: 720 - protein, 450 aa, artificial; identical to SEQ ID NO: 668
  HC [hu anti-<huCDH19> 25F8.1 VH]::huIgG1z

SEQ ID NO: 721 - protein, 450 aa, artificial; identical to SEQ ID NO: 674
  HC [hu anti-<huCDH19> 26F12.1 VH]::huIgG1z

SEQ ID NO: 722 - protein, 450 aa, artificial; identical to SEQ ID NO: 672
  HC [hu anti-<huCDH19> 26D1.1 VH]::huIgG1z

SEQ ID NO: 723 - protein, 450 aa, artificial
  HC [hu anti-<huCDH19> 25G10.1 VH]::huIgG1z
QVQLQESGPGLVKPSETLSLTCTVSGGSISGYYWSWIRQPPGKGLEWIGYIYYIGSTNYNPSLKSRVTMSVDTSKNQFSLKLSSVTAADTAVYYCARDGSSGWYRWFDPWGQGTLVTVSSASTKGPSVFPLAPSSKSTSGGTAALGCLVKDYFPEPVTVSWNSGALTSGVHTFPAVLQSSGLYSLSSVVTVPSSSLGTQTYICNVNHKPSNTKVDKKVEPKSCDKTHTCPPCPAPELLGGPSVFLFPPKPKDTLMISRTPEVTCVVVDVSHEDPEVKFNWYVDGVEVHNAKTKPREEQYNSTYRVVSVLTVLHQDWLNGKEYKCKVSNKALPAPIEKTISKAKGQPREPQVYTLPPSREEMTKNQVSLTCLVKGFYPSDIAVEWESNGQPENNYKTTPPVLDSDGSFFLYSKLTVDKSRWQQGNVFSCSVMHEALHNHYTQKSLSLSPGK

SEQ ID NO: 724 - protein, 450 aa, artificial; identical to SEQ ID NO: 658
  HC [hu anti-<huCDH19> 19B5.1 VH]::huIgG1z

SEQ ID NO: 725 - protein, 450 aa, artificial; identical to SEQ ID NO: 642
  HC [hu anti-<huCDH19> 4A2 VH]::huIgG1z

SEQ ID NO: 726 - protein, 450 aa, artificial
  HC [hu anti-<huCDH19> 4A2 (1-472)(Q17E,H47P) VH]::huIgG1z
QVQLQESGPGLVKPSETLSLTCTVSGGSISSSGYYWSWIRQPPGKGLEWIGYIYYTGSAYYNPSLKSRVTISVDTSKNQFSLKLSSVTAADTAVYYCARDGSSGWYFQYWGQGTLVTVSSASTKGPSVFPLAPSSKSTSGGTAALGCLVKDYFPEPVTVSWNSGALTSGVHTFPAVLQSSGLYSLSSVVTVPSSSLGTQTYICNVNHKPSNTKVDKKVEPKSCDKTHTCPPCPAPELLGGPSVFLFPPKPKDTLMISRTPEVTCVVVDVSHEDPEVKFNWYVDGVEVHNAKTKPREEQYNSTYRVVSVLTVLHQDWLNGKEYKCKVSNKALPAPIEKTISKAKGQPREPQVYTLPPSREEMTKNQVSLTCLVKGFYPSDIAVEWESNGQPENNYKTTPPVLDSDGSFFLYSKLTVDKSRWQQGNVFSCSVMHEALHNHYTQKSLSLSPGK

SEQ ID NO: 727 - protein, 450 aa, artificial; identical to SEQ ID NO: 642
  HC [hu anti-<huCDH19> 4A2 VH]::huIgG1z

SEQ ID NO: 728 - protein, 450 aa, artificial; identical to SEQ ID NO: 726
  HC [hu anti-<huCDH19> 4A2 (1-472)(Q17E,H47P) VH]::huIgG1z

SEQ ID NO: 729 - protein, 450 aa, artificial
  HC [hu anti-<huCDH19> 4A2 (1-472)(Q17E,H47P,D111E) VH]::huIgG1z
QVQLQESGPGLVKPSETLSLTCTVSGGSISSSGYYWSWIRQPPGKGLEWIGYIYYTGSAYYNPSLKSRVTISVDTSKNQFSLKLSSVTAADTAVYYCAREGSSGWYFQYWGQGTLVTVSSASTKGPSVFPLAPSSKSTSGGTAALGCLVKDYFPEPVTVSWNSGALTSGVHTFPAVLQSSGLYSLSSVVTVPSSSLGTQTYICNVNHKPSNTKVDKKVEPKSCDKTHTCPPCPAPELLGGPSVFLFPPKPKDTLMISRTPEVTCVVVDVSHEDPEVKFNWYVDGVEVHNAKTKPREEQYNSTYRVVSVLTVLHQDWLNGKEYKCKVSNKALPAPIEKTISKAKGQPREPQVYTLPPSREEMTKNQVSLTCLVKGFYPSDIAVEWESNGQPENNYKTTPPVLDSDGSFFLYSKLTVDKSRWQQGNVFSCSVMHEALHNHYTQKSLSLSPGK

SEQ ID NO: 730 - protein, 450 aa, artificial
  HC [hu anti-<huCDH19> 4A2 (1-472)(Q17E,H47P,D111E,W134Y) VH]::huIgG1z
QVQLQESGPGLVKPSETLSLTCTVSGGSISSSGYYWSWIRQPPGKGLEWIGYIYYTGSAYYNPSLKSRVTISVDTSKNQFSLKLSSVTAADTAVYYCAREGSSGYYFQYWGQGTLVTVSSASTKGPSVFPLAPSSKSTSGGTAALGCLVKDYFPEPVTVSWNSGALTSGVHTFPAVLQSSGLYSLSSVVTVPSSSLGTQTYICNVNHKPSNTKVDKKVEPKSCDKTHTCPPCPAPELLGGPSVFLFPPKPKDTLMISRTPEVTCVVVDVSHEDPEVKFNWYVDGVEVHNAKTKPREEQYNSTYRVVSVLTVLHQDWLNGKEYKCKVSNKALPAPIEKTISKAKGQPREPQVYTLPPSREEMTKNQVSLTCLVKGFYPSDIAVEWESNGQPENNYKTTPPVLDSDGSFFLYSKLTVDKSRWQQGNVFSCSVMHEALHNHYTQKSLSLSPGK

SEQ ID NO: 731 - protein, 450 aa, artificial; identical to SEQ ID NO: 642
  HC [hu anti-<huCDH19> 4A2 VH]::huIgG1z

SEQ ID NO: 732 - protein, 449 aa, artificial
  HC [hu anti-<huCDH19> 4F3 (1-471)(R17G) VH]::huIgG1z
QVQLVESGGGVVQPGGSLRLSCAASGFSFSSYDMDWVRQTPGKGLEWVAVIWYDGSNKYYADSVRGRFTISRDNSKNTLFLQMNSLRVEDTAVYYCARETGEGWYFDLWGRGTLVTVSSASTKGPSVFPLAPSSKSTSGGTAALGCLVKDYFPEPVTVSWNSGALTSGVHTFPAVLQSSGLYSLSSVVTVPSSSLGTQTYICNVNHKPSNTKVDKKVEPKSCDKTHTCPPCPAPELLGGPSVFLFPPKPKDTLMISRTPEVTCVVVDVSHEDPEVKFNWYVDGVEVHNAKTKPREEQYNSTYRVVSVLTVLHQDWLNGKEYKCKVSNKALPAPIEKTISKAKGQPREPQVYTLPPSREEMTKNQVSLTCLVKGFYPSDIAVEWESNGQPENNYKTTPPVLDSDGSFFLYSKLTVDKSRWQQGNVFSCSVMHEALHNHYTQKSLSLSPGK

SEQ ID NO: 733 - protein, 449 aa, artificial
  HC [hu anti-<huCDH19> 4F3 (1-471)(R17G,T47A) VH]::huIgG1z
QVQLVESGGGVVQPGGSLRLSCAASGFSFSSYDMDWVRQAPGKGLEWVAVIWYDGSNKYYADSVRGRFTISRDNSKNTLFLQMNSLRVEDTAVYYCARETGEGWYFDLWGRGTLVTVSSASTKGPSVFPLAPSSKSTSGGTAALGCLVKDYFPEPVTVSWNSGALTSGVHTFPAVLQSSGLYSLSSVVTVPSSSLGTQTYICNVNHKPSNTKVDKKVEPKSCDKTHTCPPCPAPELLGGPSVFLFPPKPKDTLMISRTPEVTCVVVDVSHEDPEVKFNWYVDGVEVHNAKTKPREEQYNSTYRVVSVLTVLHQDWLNGKEYKCKVSNKALPAPIEKTISKAKGQPREPQVYTLPPSREEMTKNQVSLTCLVKGFYPSDIAVEWESNGQPENNYKTTPPVLDSDGSFFLYSKLTVDKSRWQQGNVFSCSVMHEALHNHYTQKSLSLSPGK

SEQ ID NO: 734 - protein, 449 aa, artificial
  HC [hu anti-<huCDH19> 4F3 (1-471)(R17G,T47A,R141Q) VH]::huIgG1z
QVQLVESGGGVVQPGGSLRLSCAASGFSFSSYDMDWVRQAPGKGLEWVAVIWYDGSNKYYADSVRGRFTISRDNSKNTLFLQMNSLRVEDTAVYYCARETGEGWYFDLWGQGTLVTVSSASTKGPSVFPLAPSSKSTSGGTAALGCLVKDYFPEPVTVSWNSGALTSGVHTFPAVLQSSGLYSLSSVVTVPSSSLGTQTYICNVNHKPSNTKVDKKVEPKSCDKTHTCPPCPAPELLGGPSVFLFPPKPKDTLMISRTPEVTCVVVDVSHEDPEVKFNWYVDGVEVHNAKTKPREEQYNSTYRVVSVLTVLHQDWLNGKEYKCKVSNKALPAPIEKTISKAKGQPREPQVYTLPPSREEMTKNQVSLTCLVKGFYPSDIAVEWESNGQPENNYKTTPPVLDSDGSFFLYSKLTVDKSRWQQGNVFSCSVMHEALHNHYTQKSLSLSPGK

SEQ ID NO: 735 - protein, 449 aa, artificial
  HC [hu anti-<huCDH19> 4F3 (1-471)(R17G,T47A,D61E,D72E,R141Q) VH]::huIgG1z
QVQLVESGGGVVQPGGSLRLSCAASGFSFSSYDMDWVRQAPGKGLEWVAVIWYEGSNKYYAESVRGRFTISRDNSKNTLFLQMNSLRVEDTAVYYCARETGEGWYFDLWGQGTLVTVSSASTKGPSVFPLAPSSKSTSGGTAALGCLVKDYFPEPVTVSWNSGALTSGVHTFPAVLQSSGLYSLSSVVTVPSSSLGTQTYICNVNHKPSNTKVDKKVEPKSCDKTHTCPPCPAPELLGGPSVFLFPPKPKDTLMISRTPEVTCVVVDVSHEDPEVKFNWYVDGVEVHNAKTKPREEQYNSTYRVVSVLTVLHQDWLNGKEYKCKVSNKALPAPIEKTISKAKGQPREPQVYTLPPSREEMTKNQVSLTCLVKGFYPSDIAVEWESNGQPENNYKTTPPVLDSDGSFFLYSKLTVDKSRWQQGNVFSCSVMHEALHNHYTQKSLSLSPGK

SEQ ID NO: 736 - protein, 449 aa, artificial
  HC [hu anti-<huCDH19> 4F3 (1-471)(R17G,T47A,D61E,D72E,W134Y,R141Q) VH]::huIgG1z
QVQLVESGGGVVQPGGSLRLSCAASGFSFSSYDMDWVRQAPGKGLEWVAVIWYEGSNKYYAESVRGRFTISRDNSKNTLFLQMNSLRVEDTAVYYCARETGEGYYFDLWGQGTLVTVSSASTKGPSVFPLAPSSKSTSGGTAALGCLVKDYFPEPVTVSWNSGALTSGVHTFPAVLQSSGLYSLSSVVTVPSSSLGTQTYICNVNHKPSNTKVDKKVEPKSCDKTHTCPPCPAPELLGGPSVFLFPPKPKDTLMISRTPEVTCVVVDVSHEDPEVKFNWYVDGVEVHNAKTKPREEQYNSTYRVVSVLTVLHQDWLNGKEYKCKVSNKALPAPIEKTISKAKGQPREPQVYTLPPSREEMTKNQVSLTCLVKGFYPSDIAVEWESNGQPENNYKTTPPVLDSDGSFFLYSKLTVDKSRWQQGNVFSCSVMHEALHNHYTQKSLSLSPGK

SEQ ID NO: 737 - protein, 455 aa, artificial
  HC [hu anti-<huCDH19> 2G6 (1-477)(R17G,D61E,D72E,K94N) VH]::huIgG1z
QVQLVESGGGVVQPGGSLRLSCAASGFTFSSYGMHWVRQAPGKGLEWVAFIWYEGSNKYYAESVKDRFTISRDNSKNTLYLQMNSLRAEDTAVYYCARRAGIIGTIGYYYGMDVWGQGTTVTVSSASTKGPSVFPLAPSSKSTSGGTAALGCLVKDYFPEPVTVSWNSGALTSGVHTFPAVLQSSGLYSLSSVVTVPSSSLGTQTYICNVNHKPSNTKVDKKVEPKSCDKTHTCPPCPAPELLGGPSVFLFPPKPKDTLMISRTPEVTCVVVDVSHEDPEVKFNWYVDGVEVHNAKTKPREEQYNSTYRVVSVLTVLHQDWLNGKEYKCKVSNKALPAPIEKTISKAKGQPREPQVYTLPPSREEMTKNQVSLTCLVKGFYPSDIAVEWESNGQPENNYKTTPPVLDSDGSFFLYSKLTVDKSRWQQGNVFSCSVMHEALHNHYTQKSLSLSPGK

SEQ ID NO: 738 - protein, 450 aa, artificial; identical to SEQ ID NO: 654
  HC [hu anti-<huCDH19> 16C1.1 VH]::huIgG1z

SEQ ID NO: 739 - protein, 450 aa, artificial
  HC [hu anti-<huCDH19> 16C1.1 (1-469)(T92K) VH]::huIgG1z
QVQLQESGPGLVKPSETLSLTCTVSGGSISGYYWSWIRQPPGKGLEWIGYIYYIGSTNYNPSLKSRVTMSIDTSKNQFSLKLSSLTAADTAVYFCARDGSSGWYRWFDPWGQGTLVTVSSASTKGPSVFPLAPSSKSTSGGTAALGCLVKDYFPEPVTVSWNSGALTSGVHTFPAVLQSSGLYSLSSVVTVPSSSLGTQTYICNVNHKPSNTKVDKKVEPKSCDKTHTCPPCPAPELLGGPSVFLFPPKPKDTLMISRTPEVTCVVVDVSHEDPEVKFNWYVDGVEVHNAKTKPREEQYNSTYRVVSVLTVLHQDWLNGKEYKCKVSNKALPAPIEKTISKAKGQPREPQVYTLPPSREEMTKNQVSLTCLVKGFYPSDIAVEWESNGQPENNYKTTPPVLDSDGSFFLYSKLTVDKSRWQQGNVFSCSVMHEALHNHYTQKSLSLSPGK

SEQ ID NO: 740 - protein, 450 aa, artificial
  HC [hu anti-<huCDH19> 16C1.1 (1-469)(T92K,D109E) VH]::huIgG1z
QVQLQESGPGLVKPSETLSLTCTVSGGSISGYYWSWIRQPPGKGLEWIGYIYYIGSTNYNPSLKSRVTMSIDTSKNQFSLKLSSLTAADTAVYFCAREGSSGWYRWFDPWGQGTLVTVSSASTKGPSVFPLAPSSKSTSGGTAALGCLVKDYFPEPVTVSWNSGALTSGVHTFPAVLQSSGLYSLSSVVTVPSSSLGTQTYICNVNHKPSNTKVDKKVEPKSCDKTHTCPPCPAPELLGGPSVFLFPPKPKDTLMISRTPEVTCVVVDVSHEDPEVKFNWYVDGVEVHNAKTKPREEQYNSTYRVVSVLTVLHQDWLNGKEYKCKVSNKALPAPIEKTISKAKGQPREPQVYTLPPSREEMTKNQVSLTCLVKGFYPSDIAVEWESNGQPENNYKTTPPVLDSDGSFFLYSKLTVDKSRWQQGNVFSCSVMHEALHNHYTQKSLSLSPGK

SEQ ID NO: 741 - protein, 450 aa, artificial
  HC [hu anti-<huCDH19> 16C1.1 (1-469)(T92K,W132Y,W135Y) VH]::huIgG1z
QVQLQESGPGLVKPSETLSLTCTVSGGSISGYYWSWIRQPPGKGLEWIGYIYYIGSTNYNPSLKSRVTMSIDTSKNQFSLKLSSLTAADTAVYFCARDGSSGYYRYFDPWGQGTLVTVSSASTKGPSVFPLAPSSKSTSGGTAALGCLVKDYFPEPVTVSWNSGALTSGVHTFPAVLQSSGLYSLSSVVTVPSSSLGTQTYICNVNHKPSNTKVDKKVEPKSCDKTHTCPPCPAPELLGGPSVFLFPPKPKDTLMISRTPEVTCVVVDVSHEDPEVKFNWYVDGVEVHNAKTKPREEQYNSTYRVVSVLTVLHQDWLNGKEYKCKVSNKALPAPIEKTISKAKGQPREPQVYTLPPSREEMTKNQVSLTCLVKGFYPSDIAVEWESNGQPENNYKTTPPVLDSDGSFFLYSKLTVDKSRWQQGNVFSCSVMHEALHNHYTQKSLSLSPGK

SEQ ID NO: 742 - protein, 450 aa, artificial; identical to SEQ ID NO: 739
  HC [hu anti-<huCDH19> 16C1.1 (1-469)(T92K) VH]::huIgG1z

SEQ ID NO: 743 - protein, 452 aa, artificial; identical to SEQ ID NO: 656
  HC [hu anti-<huCDH19> 17H8.2 VH]::huIgG1z

SEQ ID NO: 744 - protein, 452 aa, artificial
  HC [hu anti-<huCDH19> 17H8.2 (1-471)(D109E) VH]::huIgG1z
QVQLQESGPGLVKPSETLSLTCTVSGGSINSYYWSWIRQPPGKGLEWIGYIYYIGSTNYNPSLKSRVTISVDTSKNQFSLKLSSVTAADTALYYCARESRYRSGWYDAFDIWGQGTMVTVSSASTKGPSVFPLAPSSKSTSGGTAALGCLVKDYFPEPVTVSWNSGALTSGVHTFPAVLQSSGLYSLSSVVTVPSSSLGTQTYICNVNHKPSNTKVDKKVEPKSCDKTHTCPPCPAPELLGGPSVFLFPPKPKDTLMISRTPEVTCVVVDVSHEDPEVKFNWYVDGVEVHNAKTKPREEQYNSTYRVVSVLTVLHQDWLNGKEYKCKVSNKALPAPIEKTISKAKGQPREPQVYTLPPSREEMTKNQVSLTCLVKGFYPSDIAVEWESNGQPENNYKTTPPVLDSDGSFFLYSKLTVDKSRWQQGNVFSCSVMHEALHNHYTQKSLSLSPGK

SEQ ID NO: 745 - protein, 452 aa, artificial
  HC [hu anti-<huCDH19> 17H8.2 (1-471)(D109E,W132Y) VH]::huIgG1z
QVQLQESGPGLVKPSETLSLTCTVSGGSINSYYWSWIRQPPGKGLEWIGYIYYIGSTNYNPSLKSRVTISVDTSKNQFSLKLSSVTAADTALYYCARESRYRSGYYDAFDIWGQGTMVTVSSASTKGPSVFPLAPSSKSTSGGTAALGCLVKDYFPEPVTVSWNSGALTSGVHTFPAVLQSSGLYSLSSVVTVPSSSLGTQTYICNVNHKPSNTKVDKKVEPKSCDKTHTCPPCPAPELLGGPSVFLFPPKPKDTLMISRTPEVTCVVVDVSHEDPEVKFNWYVDGVEVHNAKTKPREEQYNSTYRVVSVLTVLHQDWLNGKEYKCKVSNKALPAPIEKTISKAKGQPREPQVYTLPPSREEMTKNQVSLTCLVKGFYPSDIAVEWESNGQPENNYKTTPPVLDSDGSFFLYSKLTVDKSRWQQGNVFSCSVMHEALHNHYTQKSLSLSPGK

SEQ ID NO: 746 - protein, 452 aa, artificial; identical to SEQ ID NO: 744
  HC [hu anti-<huCDH19> 17H8.2 (1-471)(D109E) VH]::huIgG1z

SEQ ID NO: 747 - protein, 446 aa, artificial; identical to SEQ ID NO: 650
  HC [hu anti-<huCDH19> 4F7 VH]::huIgG1z

SEQ ID NO: 748 - protein, 446 aa, artificial; identical to SEQ ID NO: 650
  HC [hu anti-<huCDH19> 4F7 VH]::huIgG1z

SEQ ID NO: 749 - protein, 446 aa, artificial
  HC [hu anti-<huCDH19> 4F7 (1-468)(W113Y) VH]::huIgG1z
QVQLQESGPGLVKPSETLSLTCTVSGGSISSYSWSWIRQPPGKGLEWIGYIYYSGSTNYNPSLKSRVTISLDTSKNQFSLKLSSVTAADTAVYYCARNYAFHFDYWGQGTLVTVSSASTKGPSVFPLAPSSKSTSGGTAALGCLVKDYFPEPVTVSWNSGALTSGVHTFPAVLQSSGLYSLSSVVTVPSSSLGTQTYICNVNHKPSNTKVDKKVEPKSCDKTHTCPPCPAPELLGGPSVFLFPPKPKDTLMISRTPEVTCVVVDVSHEDPEVKFNWYVDGVEVHNAKTKPREEQYNSTYRVVSVLTVLHQDWLNGKEYKCKVSNKALPAPIEKTISKAKGQPREPQVYTLPPSREEMTKNQVSLTCLVKGFYPSDIAVEWESNGQPENNYKTTPPVLDSDGSFFLYSKLTVDKSRWQQGNVFSCSVMHEALHNHYTQKSLSLSPGK

SEQ ID NO: 750 - protein, 449 aa, artificial
  HC [hu anti-<huCDH19> 4B10 (1-471)(R17G,D61E,D72E,W134Y) VH]::huIgG1z
QVQLVESGGGVVQPGGSLRLSCAASGFTFSSYDMHWVRQAPGKGLEWVAVISYEGTNEYYAESVKGRFTISRDTSKNTLYLQMNSLRAEDTAVYYCARERYFDYSFDYWGQGTLVSVSSASTKGPSVFPLAPSSKSTSGGTAALGCLVKDYFPEPVTVSWNSGALTSGVHTFPAVLQSSGLYSLSSVVTVPSSSLGTQTYICNVNHKPSNTKVDKKVEPKSCDKTHTCPPCPAPELLGGPSVFLFPPKPKDTLMISRTPEVTCVVVDVSHEDPEVKFNWYVDGVEVHNAKTKPREEQYNSTYRVVSVLTVLHQDWLNGKEYKCKVSNKALPAPIEKTISKAKGQPREPQVYTLPPSREEMTKNQVSLTCLVKGFYPSDIAVEWESNGQPENNYKTTPPVLDSDGSFFLYSKLTVDKSRWQQGNVFSCSVMHEALHNHYTQKSLSLSPGK

SEQ ID NO: 751 - protein, 449 aa, artificial; identical to SEQ ID NO: 646
  HC [hu anti-<huCDH19> 4B10 VH]::huIgG1z

SEQ ID NO: 752 - protein, 449 aa, artificial
  HC [hu anti-<huCDH19> 4B10 (1-471)(R17G) VH]::huIgG1z
QVQLVESGGGVVQPGGSLRLSCAASGFTFSSYDMHWVRQAPGKGLEWVAVISYDGTNEYYADSVKGRFTISRDTSKNTLYLQMNSLRAEDTAVYYCARERYFDWSFDYWGQGTLVSVSSASTKGPSVFPLAPSSKSTSGGTAALGCLVKDYFPEPVTVSWNSGALTSGVHTFPAVLQSSGLYSLSSVVTVPSSSLGTQTYICNVNHKPSNTKVDKKVEPKSCDKTHTCPPCPAPELLGGPSVFLFPPKPKDTLMISRTPEVTCVVVDVSHEDPEVKFNWYVDGVEVHNAKTKPREEQYNSTYRVVSVLTVLHQDWLNGKEYKCKVSNKALPAPIEKTISKAKGQPREPQVYTLPPSREEMTKNQVSLTCLVKGFYPSDIAVEWESNGQPENNYKTTPPVLDSDGSFFLYSKLTVDKSRWQQGNVFSCSVMHEALHNHYTQKSLSLSPGK

SEQ ID NO: 753 - protein, 449 aa, artificial
  HC [hu anti-<huCDH19> 4B10 (1-471)(R17G,D61E,D72E) VH]::huIgG1z
QVQLVESGGGVVQPGGSLRLSCAASGFTFSSYDMHWVRQAPGKGLEWVAVISYEGTNEYYAESVKGRFTISRDTSKNTLYLQMNSLRAEDTAVYYCARERYFDWSFDYWGQGTLVSVSSASTKGPSVFPLAPSSKSTSGGTAALGCLVKDYFPEPVTVSWNSGALTSGVHTFPAVLQSSGLYSLSSVVTVPSSSLGTQTYICNVNHKPSNTKVDKKVEPKSCDKTHTCPPCPAPELLGGPSVFLFPPKPKDTLMISRTPEVTCVVVDVSHEDPEVKFNWYVDGVEVHNAKTKPREEQYNSTYRVVSVLTVLHQDWLNGKEYKCKVSNKALPAPIEKTISKAKGQPREPQVYTLPPSREEMTKNQVSLTCLVKGFYPSDIAVEWESNGQPENNYKTTPPVLDSDGSFFLYSKLTVDKSRWQQGNVFSCSVMHEALHNHYTQKSLSLSPGK

SEQ ID NO: 754 - protein, 446 aa, artificial; identical to SEQ ID NO: 644
  HC [hu anti-<huCDH19> 4A9 VH]::huIgG1z

SEQ ID NO: 755 - protein, 446 aa, artificial
  HC [hu anti-<huCDH19> 4A9 (1-468)(F55I,A56G) VH]::huIgG1z
QVQLQESGPGLVKPSETLSLTCTVSGGSISGYYWSWIRQPPGKGLEWIGYFSYSGSTNYNPSLKSRVTLSVDTSKNQFSLKLSSVTAADTAVYYCARNWAFHFDFWGQGTLVTVSSASTKGPSVFPLAPSSKSTSGGTAALGCLVKDYFPEPVTVSWNSGALTSGVHTFPAVLQSSGLYSLSSVVTVPSSSLGTQTYICNVNHKPSNTKVDKKVEPKSCDKTHTCPPCPAPELLGGPSVFLFPPKPKDTLMISRTPEVTCVVVDVSHEDPEVKFNWYVDGVEVHNAKTKPREEQYNSTYRVVSVLTVLHQDWLNGKEYKCKVSNKALPAPIEKTISKAKGQPREPQVYTLPPSREEMTKNQVSLTCLVKGFYPSDIAVEWESNGQPENNYKTTPPVLDSDGSFFLYSKLTVDKSRWQQGNVFSCSVMHEALHNHYTQKSLSLSPGK

SEQ ID NO: 756 - protein, 446 aa, artificial; identical to SEQ ID NO: 755
  HC [hu anti-<huCDH19> 4A9 (1-468)(F55I,A56G) VH]::huIgG1z

SEQ ID NO: 757 - protein, 446 aa, artificial
  HC [hu anti-<huCDH19> 4A9 (1-468)(F55I,A56G,W113Y) VH]::huIgG1z
QVQLQESGPGLVKPSETLSLTCTVSGGSISGYYWSWIRQPPGKGLEWIGYFSYSGSTNYNPSLKSRVTLSVDTSKNQFSLKLSSVTAADTAVYYCARNYAFHFDFWGQGTLVTVSSASTKGPSVFPLAPSSKSTSGGTAALGCLVKDYFPEPVTVSWNSGALTSGVHTFPAVLQSSGLYSLSSVVTVPSSSLGTQTYICNVNHKPSNTKVDKKVEPKSCDKTHTCPPCPAPELLGGPSVFLFPPKPKDTLMISRTPEVTCVVVDVSHEDPEVKFNWYVDGVEVHNAKTKPREEQYNSTYRVVSVLTVLHQDWLNGKEYKCKVSNKALPAPIEKTISKAKGQPREPQVYTLPPSREEMTKNQVSLTCLVKGFYPSDIAVEWESNGQPENNYKTTPPVLDSDGSFFLYSKLTVDKSRWQQGNVFSCSVMHEALHNHYTQKSLSLSPGK

SEQ ID NO: 758 - protein, 450 aa, artificial; identical to SEQ ID NO: 660
  HC [hu anti-<huCDH19> 20D3.1 VH]::huIgG1z

SEQ ID NO: 759 - protein, 450 aa, artificial; identical to SEQ ID NO: 660
  HC [hu anti-<huCDH19> 20D3.1 VH]::huIgG1z

SEQ ID NO: 760 - protein, 450 aa, artificial
  HC [hu anti-<huCDH19> 20D3.1 (1-469)(W133Y) VH]::huIgG1z
QVQLVQSGAEVKKPGASVKVSCKVSGYTFTSYFIHWVRQAPGQGLEWMGIINPISVSTSYAQKFQGRVTMTRDTSTSTVFMELSSLRSEDTAVYYCARGGIQLYLHFDYWGQGTLVTVSSASTKGPSVFPLAPSSKSTSGGTAALGCLVKDYFPEPVTVSWNSGALTSGVHTFPAVLQSSGLYSLSSVVTVPSSSLGTQTYICNVNHKPSNTKVDKKVEPKSCDKTHTCPPCPAPELLGGPSVFLFPPKPKDTLMISRTPEVTCVVVDVSHEDPEVKFNWYVDGVEVHNAKTKPREEQYNSTYRVVSVLTVLHQDWLNGKEYKCKVSNKALPAPIEKTISKAKGQPREPQVYTLPPSREEMTKNQVSLTCLVKGFYPSDIAVEWESNGQPENNYKTTPPVLDSDGSFFLYSKLTVDKSRWQQGNVFSCSVMHEALHNHYTQKSLSLSPGK

SEQ ID NO: 761 - protein, 450 aa, artificial; identical to SEQ ID NO: 760
  HC [hu anti-<huCDH19> 20D3.1 (1-469)(W133Y) VH]::huIgG1z

SEQ ID NO: 762 - protein, 450 aa, artificial; identical to SEQ ID NO: 760
  HC [hu anti-<huCDH19> 20D3.1 (1-469)(W133Y) VH]::huIgG1z

SEQ ID NO: 763 - protein, 451 aa, artificial
  HC [hu anti-<huCDH19> 22G10.1 (1-470)(S82R,A99E) VH]::huIgG1z
EVQLLESGGGLVQPGGSLRLSCAASGFTFSSYAMNWVRQAPGKGLEWVSTISGGGANTYYADSVKGRFTISRDNSKSTLYLQMNSLRAEDTAVYHCAKGGMGGYYYGMDVWGQGTTVTVSSASTKGPSVFPLAPSSKSTSGGTAALGCLVKDYFPEPVTVSWNSGALTSGVHTFPAVLQSSGLYSLSSVVTVPSSSLGTQTYICNVNHKPSNTKVDKKVEPKSCDKTHTCPPCPAPELLGGPSVFLFPPKPKDTLMISRTPEVTCVVVDVSHEDPEVKFNWYVDGVEVHNAKTKPREEQYNSTYRVVSVLTVLHQDWLNGKEYKCKVSNKALPAPIEKTISKAKGQPREPQVYTLPPSREEMTKNQVSLTCLVKGFYPSDIAVEWESNGQPENNYKTTPPVLDSDGSFFLYSKLTVDKSRWQQGNVFSCSVMHEALHNHYTQKSLSLSPGK

SEQ ID NO: 764 - protein, 451 aa, artificial
  HC [hu anti-<huCDH19> 22G10.1 (1-470)(A99E,H105Y) VH]::huIgG1z
EVQLLESGGGLVQPGGSLRLSCAASGFTFSSYAMNWVRQAPGKGLEWVSTISGGGANTYYADSVKGRFTISSDNSKSTLYLQMNSLRAEDTAVYYCAKGGMGGYYYGMDVWGQGTTVTVSSASTKGPSVFPLAPSSKSTSGGTAALGCLVKDYFPEPVTVSWNSGALTSGVHTFPAVLQSSGLYSLSSVVTVPSSSLGTQTYICNVNHKPSNTKVDKKVEPKSCDKTHTCPPCPAPELLGGPSVFLFPPKPKDTLMISRTPEVTCVVVDVSHEDPEVKFNWYVDGVEVHNAKTKPREEQYNSTYRVVSVLTVLHQDWLNGKEYKCKVSNKALPAPIEKTISKAKGQPREPQVYTLPPSREEMTKNQVSLTCLVKGFYPSDIAVEWESNGQPENNYKTTPPVLDSDGSFFLYSKLTVDKSRWQQGNVFSCSVMHEALHNHYTQKSLSLSPGK

SEQ ID NO: 765 - protein, 451 aa, artificial
  HC [hu anti-<huCDH19> 22G10.1 (1-470)(A99E) VH]::huIgG1z
EVQLLESGGGLVQPGGSLRLSCAASGFTFSSYAMNWVRQAPGKGLEWVSTISGGGANTYYADSVKGRFTISSDNSKSTLYLQMNSLRAEDTAVYHCAKGGMGGYYYGMDVWGQGTTVTVSSASTKGPSVFPLAPSSKSTSGGTAALGCLVKDYFPEPVTVSWNSGALTSGVHTFPAVLQSSGLYSLSSVVTVPSSSLGTQTYICNVNHKPSNTKVDKKVEPKSCDKTHTCPPCPAPELLGGPSVFLFPPKPKDTLMISRTPEVTCVVVDVSHEDPEVKFNWYVDGVEVHNAKTKPREEQYNSTYRVVSVLTVLHQDWLNGKEYKCKVSNKALPAPIEKTISKAKGQPREPQVYTLPPSREEMTKNQVSLTCLVKGFYPSDIAVEWESNGQPENNYKTTPPVLDSDGSFFLYSKLTVDKSRWQQGNVFSCSVMHEALHNHYTQKSLSLSPGK

SEQ ID NO: 766 - protein, 451 aa, artificial; identical to SEQ ID NO: 765
  HC [hu anti-<huCDH19> 22G10.1 (1-470)(A99E) VH]::huIgG1z

SEQ ID NO: 767 - protein, 451 aa, artificial
  HC [hu anti-<huCDH19> 22G10.1 (1-470)(D72E,A99E) VH]::huIgG1z
EVQLLESGGGLVQPGGSLRLSCAASGFTFSSYAMNWVRQAPGKGLEWVSTISGGGANTYYAESVKGRFTISSDNSKSTLYLQMNSLRAEDTAVYHCAKGGMGGYYYGMDVWGQGTTVTVSSASTKGPSVFPLAPSSKSTSGGTAALGCLVKDYFPEPVTVSWNSGALTSGVHTFPAVLQSSGLYSLSSVVTVPSSSLGTQTYICNVNHKPSNTKVDKKVEPKSCDKTHTCPPCPAPELLGGPSVFLFPPKPKDTLMISRTPEVTCVVVDVSHEDPEVKFNWYVDGVEVHNAKTKPREEQYNSTYRVVSVLTVLHQDWLNGKEYKCKVSNKALPAPIEKTISKAKGQPREPQVYTLPPSREEMTKNQVSLTCLVKGFYPSDIAVEWESNGQPENNYKTTPPVLDSDGSFFLYSKLTVDKSRWQQGNVFSCSVMHEALHNHYTQKSLSLSPGK

SEQ ID NO: 768 - protein, 451 aa, artificial
  HC [hu anti-<huCDH19> 22G10.1 (1-470)(H105Y) VH]::huIgG1z
EVQLLESGGGLVQPGGSLRLSCAASGFTFSSYAMNWVRQAPGKGLEWVSTISGGGANTYYADSVKGRFTISSDNSKSTLYLQMNSLRAADTAVYYCAKGGMGGYYYGMDVWGQGTTVTVSSASTKGPSVFPLAPSSKSTSGGTAALGCLVKDYFPEPVTVSWNSGALTSGVHTFPAVLQSSGLYSLSSVVTVPSSSLGTQTYICNVNHKPSNTKVDKKVEPKSCDKTHTCPPCPAPELLGGPSVFLFPPKPKDTLMISRTPEVTCVVVDVSHEDPEVKFNWYVDGVEVHNAKTKPREEQYNSTYRVVSVLTVLHQDWLNGKEYKCKVSNKALPAPIEKTISKAKGQPREPQVYTLPPSREEMTKNQVSLTCLVKGFYPSDIAVEWESNGQPENNYKTTPPVLDSDGSFFLYSKLTVDKSRWQQGNVFSCSVMHEALHNHYTQKSLSLSPGK

SEQ ID NO: 769 - protein, 455 aa, artificial
  HC [hu anti-<huCDH19> 16A4.1 (1-474)(T144L) VH]::huIgG1z
QVQLQESGPGLAKPSETLSLTCTVSGDSITSYYWSWIRQPPGKGLEWIGYIYYSGSTNYNPSLKSRVTISVDTSKNQFSLKLSSVTAADTAVYYCARDQRRIAAAGTHFYGMDVWGQGTLVTVSSASTKGPSVFPLAPSSKSTSGGTAALGCLVKDYFPEPVTVSWNSGALTSGVHTFPAVLQSSGLYSLSSVVTVPSSSLGTQTYICNVNHKPSNTKVDKKVEPKSCDKTHTCPPCPAPELLGGPSVFLFPPKPKDTLMISRTPEVTCVVVDVSHEDPEVKFNWYVDGVEVHNAKTKPREEQYNSTYRVVSVLTVLHQDWLNGKEYKCKVSNKALPAPIEKTISKAKGQPREPQVYTLPPSREEMTKNQVSLTCLVKGFYPSDIAVEWESNGQPENNYKTTPPVLDSDGSFFLYSKLTVDKSRWQQGNVFSCSVMHEALHNHYTQKSLSLSPGK

SEQ ID NO: 770 - protein, 450 aa, artificial; identical to SEQ ID NO: 658
  HC [hu anti-<huCDH19> 19B5.1 VH]::huIgG1z

SEQ ID NO: 771 - protein, 450 aa, artificial
  HC [hu anti-<huCDH19> 19B5.1 (1-469)(W133Y) VH]::huIgG1z
QVQLVQSGAEVKKPGASVKVSCKVSGYTFTSYFIHWVRQAPGQGLEWMGIINPISVSTSYAQKFQGRVTMTRDTSTSTVFMELSSLRSEDTAVYYCARGGIQLYLHLDYWGQGTLVTVSSASTKGPSVFPLAPSSKSTSGGTAALGCLVKDYFPEPVTVSWNSGALTSGVHTFPAVLQSSGLYSLSSVVTVPSSSLGTQTYICNVNHKPSNTKVDKKVEPKSCDKTHTCPPCPAPELLGGPSVFLFPPKPKDTLMISRTPEVTCVVVDVSHEDPEVKFNWYVDGVEVHNAKTKPREEQYNSTYRVVSVLTVLHQDWLNGKEYKCKVSNKALPAPIEKTISKAKGQPREPQVYTLPPSREEMTKNQVSLTCLVKGFYPSDIAVEWESNGQPENNYKTTPPVLDSDGSFFLYSKLTVDKSRWQQGNVFSCSVMHEALHNHYTQKSLSLSPGK

SEQ ID NO: 772 - protein, 450 aa, artificial; identical to SEQ ID NO: 658
  HC [hu anti-<huCDH19> 19B5.1 VH]::huIgG1z

SEQ ID NO: 773 - protein, 450 aa, artificial; identical to SEQ ID NO: 658
  HC [hu anti-<huCDH19> 19B5.1 VH]::huIgG1z

SEQ ID NO: 774 - protein, 450 aa, artificial; identical to SEQ ID NO: 771
  HC [hu anti-<huCDH19> 19B5.1 (1-469)(W133Y) VH]::huIgG1z

SEQ ID NO: 775 - protein, 455 aa, artificial
  HC [hu anti-<huCDH19> 23A10.3 (1-474)(L92Q) VH]::huIgG1z
QVQLVESGGGVVQPGRSLRLSCAASGFTFSRYGIHWVRQAPGKGLEWVAVIWYDGSNKYYADSVKGRFTISRDNSKNTLYLQMNSLRAEDSAVYYCARRAGIPGTTGYYYGMDVWGQGTTVTVSSASTKGPSVFPLAPSSKSTSGGTAALGCLVKDYFPEPVTVSWNSGALTSGVHTFPAVLQSSGLYSLSSVVTVPSSSLGTQTYICNVNHKPSNTKVDKKVEPKSCDKTHTCPPCPAPELLGGPSVFLFPPKPKDTLMISRTPEVTCVVVDVSHEDPEVKFNWYVDGVEVHNAKTKPREEQYNSTYRVVSVLTVLHQDWLNGKEYKCKVSNKALPAPIEKTISKAKGQPREPQVYTLPPSREEMTKNQVSLTCLVKGFYPSDIAVEWESNGQPENNYKTTPPVLDSDGSFFLYSKLTVDKSRWQQGNVFSCSVMHEALHNHYTQKSLSLSPGK

SEQ ID NO: 776 - protein, 455 aa, artificial
  HC [hu anti-<huCDH19> 23A10.3 (1-474)(R17G,L92Q) VH]::huIgG1z
QVQLVESGGGVVQPGGSLRLSCAASGFTFSRYGIHWVRQAPGKGLEWVAVIWYDGSNKYYADSVKGRFTISRDNSKNTLYLQMNSLRAEDSAVYYCARRAGIPGTTGYYYGMDVWGQGTTVTVSSASTKGPSVFPLAPSSKSTSGGTAALGCLVKDYFPEPVTVSWNSGALTSGVHTFPAVLQSSGLYSLSSVVTVPSSSLGTQTYICNVNHKPSNTKVDKKVEPKSCDKTHTCPPCPAPELLGGPSVFLFPPKPKDTLMISRTPEVTCVVVDVSHEDPEVKFNWYVDGVEVHNAKTKPREEQYNSTYRVVSVLTVLHQDWLNGKEYKCKVSNKALPAPIEKTISKAKGQPREPQVYTLPPSREEMTKNQVSLTCLVKGFYPSDIAVEWESNGQPENNYKTTPPVLDSDGSFFLYSKLTVDKSRWQQGNVFSCSVMHEALHNHYTQKSLSLSPGK

SEQ ID NO: 777 - protein, 455 aa, artificial
  HC [hu anti-<huCDH19> 23A10.3 (1-474)(R17G,D61E,D72E,L92Q) VH]::huIgG1z
QVQLVESGGGVVQPGGSLRLSCAASGFTFSRYGIHWVRQAPGKGLEWVAVIWYEGSNKYYAESVKGRFTISRDNSKNTLYLQMNSLRAEDSAVYYCARRAGIPGTTGYYYGMDVWGQGTTVTVSSASTKGPSVFPLAPSSKSTSGGTAALGCLVKDYFPEPVTVSWNSGALTSGVHTFPAVLQSSGLYSLSSVVTVPSSSLGTQTYICNVNHKPSNTKVDKKVEPKSCDKTHTCPPCPAPELLGGPSVFLFPPKPKDTLMISRTPEVTCVVVDVSHEDPEVKFNWYVDGVEVHNAKTKPREEQYNSTYRVVSVLTVLHQDWLNGKEYKCKVSNKALPAPIEKTISKAKGQPREPQVYTLPPSREEMTKNQVSLTCLVKGFYPSDIAVEWESNGQPENNYKTTPPVLDSDGSFFLYSKLTVDKSRWQQGNVFSCSVMHEALHNHYTQKSLSLSPGK

SEQ ID NO: 778 - protein, 455 aa, artificial; identical to SEQ ID NO: 666
  HC [hu anti-<huCDH19> 23A10.3 VH]::huIgG1z

SEQ ID NO: 779 - protein, 450 aa, artificial; identical to SEQ ID NO: 723
  HC [hu anti-<huCDH19> 25G10.1 VH]::huIgG1z

SEQ ID NO: 780 - protein, 450 aa, artificial
  HC [hu anti-<huCDH19> 25G10.1 (1-469)(D109E,W132Y,W135Y) VH]::huIgG1z
QVQLQESGPGLVKPSETLSLTCTVSGGSISGYYWSWIRQPPGKGLEWIGYIYYIGSTNYNPSLKSRVTMSVDTSKNQFSLKLSSVTAADTAVYYCAREGSSGYYRYFDPWGQGTLVTVSSASTKGPSVFPLAPSSKSTSGGTAALGCLVKDYFPEPVTVSWNSGALTSGVHTFPAVLQSSGLYSLSSVVTVPSSSLGTQTYICNVNHKPSNTKVDKKVEPKSCDKTHTCPPCPAPELLGGPSVFLFPPKPKDTLMISRTPEVTCVVVDVSHEDPEVKFNWYVDGVEVHNAKTKPREEQYNSTYRVVSVLTVLHQDWLNGKEYKCKVSNKALPAPIEKTISKAKGQPREPQVYTLPPSREEMTKNQVSLTCLVKGFYPSDIAVEWESNGQPENNYKTTPPVLDSDGSFFLYSKLTVDKSRWQQGNVFSCSVMHEALHNHYTQKSLSLSPGK

SEQ ID NO: 781 - protein, 450 aa, artificial; identical to SEQ ID NO: 672
  HC [hu anti-<huCDH19> 26D1.1 VH]::huIgG1z

SEQ ID NO: 782 - protein, 450 aa, artificial; identical to SEQ ID NO: 672
  HC [hu anti-<huCDH19> 26D1.1 VH]::huIgG1z

SEQ ID NO: 783 - protein, 450 aa, artificial; identical to SEQ ID NO: 672
  HC [hu anti-<huCDH19> 26D1.1 VH]::huIgG1z

SEQ ID NO: 784 - protein, 450 aa, artificial; identical to SEQ ID NO: 672
  HC [hu anti-<huCDH19> 26D1.1 VH]::huIgG1z

SEQ ID NO: 785 - protein, 450 aa, artificial
  HC [hu anti-<huCDH19> 26D1.1 (1-469)(W133Y) VH]::huIgG1z
QVQLVQSGAEVKKPGASVKVSCKASRYTFTSYYMSWVRQAPGQGLEWMGIIHPSGGDTTYAQKFQGRVTMTGDTSTSTVYMELSSLRSEDTAVYYCARGGIKLYLHFDYWGQGTLVTVSSASTKGPSVFPLAPSSKSTSGGTAALGCLVKDYFPEPVTVSWNSGALTSGVHTFPAVLQSSGLYSLSSVVTVPSSSLGTQTYICNVNHKPSNTKVDKKVEPKSCDKTHTCPPCPAPELLGGPSVFLFPPKPKDTLMISRTPEVTCVVVDVSHEDPEVKFNWYVDGVEVHNAKTKPREEQYNSTYRVVSVLTVLHQDWLNGKEYKCKVSNKALPAPIEKTISKAKGQPREPQVYTLPPSREEMTKNQVSLTCLVKGFYPSDIAVEWESNGQPENNYKTTPPVLDSDGSFFLYSKLTVDKSRWQQGNVFSCSVMHEALHNHYTQKSLSLSPGK

SEQ ID NO: 786 - protein, 450 aa, artificial
  HC [hu anti-<huCDH19> 26D1.1 (1-469)(R27G,G82R) VH]::huIgG1z
QVQLVQSGAEVKKPGASVKVSCKASGYTFTSYYMSWVRQAPGQGLEWMGIIHPSGGDTTYAQKFQGRVTMTRDTSTSTVYMELSSLRSEDTAVYYCARGGIKLWLHFDYWGQGTLVTVSSASTKGPSVFPLAPSSKSTSGGTAALGCLVKDYFPEPVTVSWNSGALTSGVHTFPAVLQSSGLYSLSSVVTVPSSSLGTQTYICNVNHKPSNTKVDKKVEPKSCDKTHTCPPCPAPELLGGPSVFLFPPKPKDTLMISRTPEVTCVVVDVSHEDPEVKFNWYVDGVEVHNAKTKPREEQYNSTYRVVSVLTVLHQDWLNGKEYKCKVSNKALPAPIEKTISKAKGQPREPQVYTLPPSREEMTKNQVSLTCLVKGFYPSDIAVEWESNGQPENNYKTTPPVLDSDGSFFLYSKLTVDKSRWQQGNVFSCSVMHEALHNHYTQKSLSLSPGK

SEQ ID NO: 787 - protein, 450 aa, artificial; identical to SEQ ID NO: 674
  HC [hu anti-<huCDH19> 26F12.1 VH]::huIgG1z

SEQ ID NO: 788 - protein, 450 aa, artificial; identical to SEQ ID NO: 674
  HC [hu anti-<huCDH19> 26F12.1 VH]::huIgG1z

SEQ ID NO: 789 - protein, 450 aa, artificial
  HC [hu anti-<huCDH19> 26F12.1 (1-469)(W133Y) VH]::huIgG1z
QVQLVQSGAEVKKPGASVKVSCKASRYTFTNYYMSWVRQAPGQGLEWMGIINPSGGDSTYAQKFQGRLTMTGDTSTSTVYMELSSLRSEDTAVYYCARGGIQLYLHFDYWGQGTLVTVSSASTKGPSVFPLAPSSKSTSGGTAALGCLVKDYFPEPVTVSWNSGALTSGVHTFPAVLQSSGLYSLSSVVTVPSSSLGTQTYICNVNHKPSNTKVDKKVEPKSCDKTHTCPPCPAPELLGGPSVFLFPPKPKDTLMISRTPEVTCVVVDVSHEDPEVKFNWYVDGVEVHNAKTKPREEQYNSTYRVVSVLTVLHQDWLNGKEYKCKVSNKALPAPIEKTISKAKGQPREPQVYTLPPSREEMTKNQVSLTCLVKGFYPSDIAVEWESNGQPENNYKTTPPVLDSDGSFFLYSKLTVDKSRWQQGNVFSCSVMHEALHNHYTQKSLSLSPGK

SEQ ID NO: 790 - protein, 450 aa, artificial; identical to SEQ ID NO: 789
  HC [hu anti-<huCDH19> 26F12.1 (1-469)(W133Y) VH]::huIgG1z

SEQ ID NO: 791 - protein, 450 aa, artificial; identical to SEQ ID NO: 668
  HC [hu anti-<huCDH19> 25F8.1 VH]::huIgG1z

SEQ ID NO: 792 - protein, 450 aa, artificial; identical to SEQ ID NO: 668
  HC [hu anti-<huCDH19> 25F8.1 VH]::huIgG1z

SEQ ID NO: 793 - protein, 450 aa, artificial
  HC [hu anti-<huCDH19> 25F8.1 (1-469)(F90Y) VH]::huIgG1z
QVQLVQSGAEVKKPGASVKVSCKASGYTFTSYYIHWVRQAPGQGLEWMGIINPSGGSTRYAQKFQGRVTMTRDTSTSTVYMELSSLRSEDTAVYYCARGGIQLWLHFDYWGQGTLVTVSSASTKGPSVFPLAPSSKSTSGGTAALGCLVKDYFPEPVTVSWNSGALTSGVHTFPAVLQSSGLYSLSSVVTVPSSSLGTQTYICNVNHKPSNTKVDKKVEPKSCDKTHTCPPCPAPELLGGPSVFLFPPKPKDTLMISRTPEVTCVVVDVSHEDPEVKFNWYVDGVEVHNAKTKPREEQYNSTYRVVSVLTVLHQDWLNGKEYKCKVSNKALPAPIEKTISKAKGQPREPQVYTLPPSREEMTKNQVSLTCLVKGFYPSDIAVEWESNGQPENNYKTTPPVLDSDGSFFLYSKLTVDKSRWQQGNVFSCSVMHEALHNHYTQKSLSLSPGK

SEQ ID NO: 794 - protein, 450 aa, artificial; identical to SEQ ID NO: 793
  HC [hu anti-<huCDH19> 25F8.1 (1-469)(F90Y) VH]::huIgG1z

SEQ ID NO: 795 - protein, 450 aa, artificial
  HC [hu anti-<huCDH19> 25F8.1 (1-469)(F90Y,W133Y) VH]::huIgG1z
QVQLVQSGAEVKKPGASVKVSCKASGYTFTSYYIHWVRQAPGQGLEWMGIINPSGGSTRYAQKFQGRVTMTRDTSTSTVYMELSSLRSEDTAVYYCARGGIQLYLHFDYWGQGTLVTVSSASTKGPSVFPLAPSSKSTSGGTAALGCLVKDYFPEPVTVSWNSGALTSGVHTFPAVLQSSGLYSLSSVVTVPSSSLGTQTYICNVNHKPSNTKVDKKVEPKSCDKTHTCPPCPAPELLGGPSVFLFPPKPKDTLMISRTPEVTCVVVDVSHEDPEVKFNWYVDGVEVHNAKTKPREEQYNSTYRVVSVLTVLHQDWLNGKEYKCKVSNKALPAPIEKTISKAKGQPREPQVYTLPPSREEMTKNQVSLTCLVKGFYPSDIAVEWESNGQPENNYKTTPPVLDSDGSFFLYSKLTVDKSRWQQGNVFSCSVMHEALHNHYTQKSLSLSPGK

SEQ ID NO: 796 - protein, 450 aa, artificial; identical to SEQ ID NO: 662
  HC [hu anti-<huCDH19> 22D1.1 VH]::huIgG1z

SEQ ID NO: 797 - protein, 450 aa, artificial; identical to SEQ ID NO: 662
  HC [hu anti-<huCDH19> 22D1.1 VH]::huIgG1z

SEQ ID NO: 798 - protein, 450 aa, artificial
  hu anti-<huCDH19> 22D1.1 (1-469)(W133Y) VH]::huIgG1z
QVQLVQSGAEVKKPGASVRVSCKVSGYTFTSYFIHWVRQAPGQGLEWMGIINPISVSTSYAQKFQGRVTMTRDTSTSTVFMELSSLRSEDTAVYYCARGGIQLYLHLDYWGQGTLVTVSSASTKGPSVFPLAPSSKSTSGGTAALGCLVKDYFPEPVTVSWNSGALTSGVHTFPAVLQSSGLYSLSSVVTVPSSSLGTQTYICNVNHKPSNTKVDKKVEPKSCDKTHTCPPCPAPELLGGPSVFLFPPKPKDTLMISRTPEVTCVVVDVSHEDPEVKFNWYVDGVEVHNAKTKPREEQYNSTYRVVSVLTVLHQDWLNGKEYKCKVSNKALPAPIEKTISKAKGQPREPQVYTLPPSREEMTKNQVSLTCLVKGFYPSDIAVEWESNGQPENNYKTTPPVLDSDGSFFLYSKLTVDKSRWQQGNVFSCSVMHEALHNHYTQKSLSLSPGK

SEQ ID NO: 799 - protein, 450 aa, artificial; identical to SEQ ID NO: 798
  HC [hu anti-<huCDH19> 22D1.1 (1-469)(W133Y) VH]::huIgG1z

SEQ ID NO: 800 - protein, 450 aa, artificial
  HC [hu anti-<huCDH19> 22D1.1 (1-469)(F90Y) VH]::huIgG1z
QVQLVQSGAEVKKPGASVRVSCKVSGYTFTSYFIHWVRQAPGQGLEWMGIINPISVSTSYAQKFQGRVTMTRDTSTSTVYMELSSLRSEDTAVYYCARGGIQLWLHLDYWGQGTLVTVSSASTKGPSVFPLAPSSKSTSGGTAALGCLVKDYFPEPVTVSWNSGALTSGVHTFPAVLQSSGLYSLSSVVTVPSSSLGTQTYICNVNHKPSNTKVDKKVEPKSCDKTHTCPPCPAPELLGGPSVFLFPPKPKDTLMISRTPEVTCVVVDVSHEDPEVKFNWYVDGVEVHNAKTKPREEQYNSTYRVVSVLTVLHQDWLNGKEYKCKVSNKALPAPIEKTISKAKGQPREPQVYTLPPSREEMTKNQVSLTCLVKGFYPSDIAVEWESNGQPENNYKTTPPVLDSDGSFFLYSKLTVDKSRWQQGNVFSCSVMHEALHNHYTQKSLSLSPGK

SEQ ID NO: 801 - protein, 446 aa, artificial; identical to SEQ ID NO: 650
  HC [hu anti-<huCDH19> 4F7 VH]::huIgG1z

SEQ ID NO: 802 - protein, 455 aa, artificial; identical to SEQ ID NO: 640
  HC [hu anti-<huCDH19> 2G6 VH]::huIgG1z

SEQ ID NO: 803 - protein, 455 aa, artificial
  HC [hu anti-<huCDH19> 2G6 (1-477)(R17G,K94N) VH]::huIgG1z
QVQLVESGGGVVQPGGSLRLSCAASGFTFSSYGMHWVRQAPGKGLEWVAFIWYDGSNKYYADSVKDRFTISRDNSKNTLYLQMNSLRAEDTAVYYCARRAGIIGTIGYYYGMDVWGQGTTVTVSSASTKGPSVFPLAPSSKSTSGGTAALGCLVKDYFPEPVTVSWNSGALTSGVHTFPAVLQSSGLYSLSSVVTVPSSSLGTQTYICNVNHKPSNTKVDKKVEPKSCDKTHTCPPCPAPELLGGPSVFLFPPKPKDTLMISRTPEVTCVVVDVSHEDPEVKFNWYVDGVEVHNAKTKPREEQYNSTYRVVSVLTVLHQDWLNGKEYKCKVSNKALPAPIEKTISKAKGQPREPQVYTLPPSREEMTKNQVSLTCLVKGFYPSDIAVEWESNGQPENNYKTTPPVLDSDGSFFLYSKLTVDKSRWQQGNVFSCSVMHEALHNHYTQKSLSLSPGK

SEQ ID NO: 804 - protein, 455 aa, artificial
  HC [hu anti-<huCDH19> 2G6 (1-477)(D61E,D72E) VH]::huIgG1z
QVQLVESGGGVVQPGRSLRLSCAASGFTFSSYGMHWVRQAPGKGLEWVAFIWYEGSNKYYAESVKDRFTISRDNSKNTLYLQMKSLRAEDTAVYYCARRAGIIGTIGYYYGMDVWGQGTTVTVSSASTKGPSVFPLAPSSKSTSGGTAALGCLVKDYFPEPVTVSWNSGALTSGVHTFPAVLQSSGLYSLSSVVTVPSSSLGTQTYICNVNHKPSNTKVDKKVEPKSCDKTHTCPPCPAPELLGGPSVFLFPPKPKDTLMISRTPEVTCVVVDVSHEDPEVKFNWYVDGVEVHNAKTKPREEQYNSTYRVVSVLTVLHQDWLNGKEYKCKVSNKALPAPIEKTISKAKGQPREPQVYTLPPSREEMTKNQVSLTCLVKGFYPSDIAVEWESNGQPENNYKTTPPVLDSDGSFFLYSKLTVDKSRWQQGNVFSCSVMHEALHNHYTQKSLSLSPGK

SEQ ID NO: 805 - protein, 455 aa, artificial
  HC [hu anti-<huCDH19> 2G6 (1-477)(R17G) VH]::huIgG1z
QVQLVESGGGVVQPGGSLRLSCAASGFTFSSYGMHWVRQAPGKGLEWVAFIWYDGSNKYYADSVKDRFTISRDNSKNTLYLQMKSLRAEDTAVYYCARRAGIIGTIGYYYGMDVWGQGTTVTVSSASTKGPSVFPLAPSSKSTSGGTAALGCLVKDYFPEPVTVSWNSGALTSGVHTFPAVLQSSGLYSLSSVVTVPSSSLGTQTYICNVNHKPSNTKVDKKVEPKSCDKTHTCPPCPAPELLGGPSVFLFPPKPKDTLMISRTPEVTCVVVDVSHEDPEVKFNWYVDGVEVHNAKTKPREEQYNSTYRVVSVLTVLHQDWLNGKEYKCKVSNKALPAPIEKTISKAKGQPREPQVYTLPPSREEMTKNQVSLTCLVKGFYPSDIAVEWESNGQPENNYKTTPPVLDSDGSFFLYSKLTVDKSRWQQGNVFSCSVMHEALHNHYTQKSLSLSPGK

SEQ ID NO: 806 - protein, 214 aa, artificial; identical to SEQ ID NO: 684
  LC [hu anti-<huCDH19> 4F3 VL]::huKLC

SEQ ID NO: 807 - protein, 217 aa, artificial; identical to SEQ ID NO: 680
  LC [hu anti-<huCDH19> 4A9 VL]::huLLC-C1

SEQ ID NO: 808 - protein, 214 aa, artificial; identical to SEQ ID NO: 682
  LC [hu anti-<huCDH19> 4B10 VL]::huKLC

SEQ ID NO: 809 - protein, 215 aa, artificial; identical to SEQ ID NO: 692
  LC [hu anti-<huCDH19> 17H8.2 VL]::huKLC

SEQ ID NO: 810 - protein, 215 aa, artificial; identical to SEQ ID NO: 690
  LC [hu anti-<huCDH19> 16C1.1 VL]::huKLC

SEQ ID NO: 811 - protein, 215 aa, artificial; identical to SEQ ID NO: 688
  LC [hu anti-<huCDH19> 16A4.1 VL]::huKLC

SEQ ID NO: 812 - protein, 214 aa, artificial; identical to SEQ ID NO: 700
  LC [hu anti-<huCDH19> 22G10.1 VL]::huKLC

SEQ ID NO: 813 - protein, 216 aa, artificial; identical to SEQ ID NO: 696
  LC [hu anti-<huCDH19> 20D3.1 VL]::huLLC-C2

SEQ ID NO: 814 - protein, 216 aa, artificial; identical to SEQ ID NO: 698
  LC [hu anti-<huCDH19> 22D1.1 VL]::huLLC-C2

SEQ ID NO: 815 - protein, 216 aa, artificial; identical to SEQ ID NO: 704
  LC [hu anti-<huCDH19> 25F8.1 VL]::huLLC-C2

SEQ ID NO: 816 - protein, 216 aa, artificial; identical to SEQ ID NO: 710
  LC [hu anti-<huCDH19> 26F12.1 VL]::huLLC-C2

SEQ ID NO: 817 - protein, 216 aa, artificial; identical to SEQ ID NO: 708
  LC [hu anti-<huCDH19> 26D1.1 VL]::huLLC-C2

SEQ ID NO: 818 - protein, 215 aa, artificial; identical to SEQ ID NO: 706
  LC [hu anti-<huCDH19> 25G10.1 VL]::huKLC

SEQ ID NO: 819 - protein, 216 aa, artificial; identical to SEQ ID NO: 694
  LC [hu anti-<huCDH19> 19B5.1 VL]::huLLC-C2

SEQ ID NO: 820 - protein, 214 aa, artificial
  LC [hu anti-<huCDH19> 4A2 (1-236)(N30Q) VL]::huKLC
EIVLTQSPGTLSLSPGERATLSCRASRQISSSYLAWYQQKPGQAPRLLIYGPSSRATGIPDRFSGSGSGTDFTLTISRLEPEDFTVYYCQQYGSSFTFGPGTKVDIKRTVAAPSVFIFPPSDEQLKSGTASVVCLLNNFYPREAKVQWKVDNALQSGNSQESVTEQDSKDSTYSLSSTLTLSKADYEKHKVYACEVTHQGLSSPVTKSFNRGEC

SEQ ID NO: 821 - protein, 214 aa, artificial
  LC [hu anti-<huCDH19> 4A2 (1-236)(N30Q,T102A,P141Q) VL]::huKLC
EIVLTQSPGTLSLSPGERATLSCRASRQISSSYLAWYQQKPGQAPRLLIYGPSSRATGIPDRFSGSGSGTDFTLTISRLEPEDFAVYYCQQYGSSFTFGQGTKVDIKRTVAAPSVFIFPPSDEQLKSGTASVVCLLNNFYPREAKVQWKVDNALQSGNSQESVTEQDSKDSTYSLSSTLTLSKADYEKHKVYACEVTHQGLSSPVTKSFNRGEC

SEQ ID NO: 822 - protein, 214 aa, artificial
  LC [hu anti-<huCDH19> 4A2 (1-236)(N30Q,T102A) VL]::huKLC
EIVLTQSPGTLSLSPGERATLSCRASRQISSSYLAWYQQKPGQAPRLLIYGPSSRATGIPDRFSGSGSGTDFTLTISRLEPEDFAVYYCQQYGSSFTFGPGTKVDIKRTVAAPSVFIFPPSDEQLKSGTASVVCLLNNFYPREAKVQWKVDNALQSGNSQESVTEQDSKDSTYSLSSTLTLSKADYEKHKVYACEVTHQGLSSPVTKSFNRGEC

SEQ ID NO: 823 - protein, 214 aa, artificial; identical to SEQ ID NO: 822
  LC [hu anti-<huCDH19> 4A2 (1-236)(N30Q,T102A) VL]::huKLC

SEQ ID NO: 824 - protein, 214 aa, artificial; identical to SEQ ID NO: 821
  LC [hu anti-<huCDH19> 4A2 (1-236)(N30Q,T102A,P141Q) VL]::huKLC

SEQ ID NO: 825 - protein, 214 aa, artificial; identical to SEQ ID NO: 821
  LC [hu anti-<huCDH19> 4A2 (1-236)(N30Q,T102A,P141Q) VL]::huKLC

SEQ ID NO: 826 - protein, 214 aa, artificial
  LC [hu anti-<huCDH19> 4A2 (1-236)(R29Q,N30S) VL]::huKLC
EIVLTQSPGTLSLSPGERATLSCRASQSISSSYLAWYQQKPGQAPRLLIYGPSSRATGIPDRFSGSGSGTDFTLTISRLEPEDFTVYYCQQYGSSFTFGPGTKVDIKRTVAAPSVFIFPPSDEQLKSGTASVVCLLNNFYPREAKVQWKVDNALQSGNSQESVTEQDSKDSTYSLSSTLTLSKADYEKHKVYACEVTHQGLSSPVTKSFNRGEC

SEQ ID NO: 827 - protein, 214 aa, artificial; identical to SEQ ID NO: 684
  LC [hu anti-<huCDH19> 4F3 VL]::huKLC

SEQ ID NO: 828 - protein, 214 aa, artificial; identical to SEQ ID NO: 684
  LC [hu anti-<huCDH19> 4F3 VL]::huKLC

SEQ ID NO: 829 - protein, 214 aa, artificial; identical to SEQ ID NO: 684
  LC [hu anti-<huCDH19> 4F3 VL]::huKLC

SEQ ID NO: 830 - protein, 214 aa, artificial; identical to SEQ ID NO: 684
  LC [hu anti-<huCDH19> 4F3 VL]::huKLC

SEQ ID NO: 831 - protein, 214 aa, artificial; identical to SEQ ID NO: 684
  LC [hu anti-<huCDH19> 4F3 VL]::huKLC

SEQ ID NO: 832 - protein, 212 aa, artificial
  LC [hu anti-<huCDH19> 2G6 (1-234)(C42S,D110E) VL]::huLLC-C1
SYELTQPPSVSVSPGQTASITCSGDRLGEKYTSWYQQRPGQSPLLVIYQDTKRPSGIPERFSGSNSGNTATLTISGTQAMDEADYYCQAWESSTVVFGGGTKLTVLGQPKANPTVTLFPPSSEELQANKATLVCLISDFYPGAVTVAWKADGSPVKAGVETTKPSKQSNNKYAASSYLSLTPEQWKSHRSYSCQVTHEGSTVEKTVAPTECS

SEQ ID NO: 833 - protein, 215 aa, artificial
  LC [hu anti-<huCDH19> 16C1.1 (1-235)(H105Y) VL]::huKLC
EIVLTQSPGTLSLSPGERATLSCRASQSVSSSYLAWYQQKPGQAPRLLIFGASSRATGIPDRFSGSGSGTDFTLTISGLEPEDFAVYYCQQYGNSPLTFGGGTKVEIKRTVAAPSVFIFPPSDEQLKSGTASVVCLLNNFYPREAKVQWKVDNALQSGNSQESVTEQDSKDSTYSLSSTLTLSKADYEKHKVYACEVTHQGLSSPVTKSFNRGEC

SEQ ID NO: 834 - protein, 215 aa, artificial; identical to SEQ ID NO: 833
  LC [hu anti-<huCDH19> 16C1.1 (1-235)(H105Y) VL]::huKLC

SEQ ID NO: 835 - protein, 215 aa, artificial; identical to SEQ ID NO: 833
  LC [hu anti-<huCDH19> 16C1.1 (1-235)(H105Y) VL]::huKLC

SEQ ID NO: 836 - protein, 215 aa, artificial; identical to SEQ ID NO: 833
  LC [hu anti-<huCDH19> 16C1.1 (1-235)(H105Y) VL]::huKLC

SEQ ID NO: 837 - protein, 215 aa, artificial
  LC [hu anti-<huCDH19> 16C1.1 (1-235)(G95R,H105Y,G141Q) VL]::huKLC
EIVLTQSPGTLSLSPGERATLSCRASQSVSSSYLAWYQQKPGQAPRLLIFGASSRATGIPDRFSGSGSGTDFTLTISRLEPEDFAVYYCQQYGNSPLTFGQGTKVEIKRTVAAPSVFIFPPSDEQLKSGTASVVCLLNNFYPREAKVQWKVDNALQSGNSQESVTEQDSKDSTYSLSSTLTLSKADYEKHKVYACEVTHQGLSSPVTKSFNRGEC

SEQ ID NO: 838 - protein, 215 aa, artificial
  LC [hu anti-<huCDH19> 17H8.2 (1-235)(G149R) VL]::huKLC
DIVLTQSPGTLSLSPGERATLSCRASQSVAGSYLAWYQQKPGQAPRLLISGASSRATGIPDRFSGSGSGTDFTLTISRLEPEDFAVYYCQQYGKSPITFGQGTRLEMKRTVAAPSVFIFPPSDEQLKSGTASVVCLLNNFYPREAKVQWKVDNALQSGNSQESVTEQDSKDSTYSLSSTLTLSKADYEKHKVYACEVTHQGLSSPVTKSFNRGEC

SEQ ID NO: 839 - protein, 215 aa, artificial; identical to SEQ ID NO: 838
  LC [hu anti-<huCDH19> 17H8.2 (1-235)(G149R) VL]::huKLC

SEQ ID NO: 840 - protein, 215 aa, artificial; identical to SEQ ID NO: 838
  LC [hu anti-<huCDH19> 17H8.2 (1-235)(G149R) VL]::huKLC

SEQ ID NO: 841 - protein, 215 aa, artificial
  LC [hu anti-<huCDH19> 17H8.2 (1-235)(S57Y,G149R) VL]::huKLC
DIVLTQSPGTLSLSPGERATLSCRASQSVAGSYLAWYQQKPGQAPRLLIYGASSRATGIPDRFSGSGSGTDFTLTISRLEPEDFAVYYCQQYGKSPITFGQGTRLEMKRTVAAPSVFIFPPSDEQLKSGTASVVCLLNNFYPREAKVQWKVDNALQSGNSQESVTEQDSKDSTYSLSSTLTLSKADYEKHKVYACEVTHQGLSSPVTKSFNRGEC

SEQ ID NO: 842 - protein, 217 aa, artificial
  LC [hu anti-<huCDH19> 4F7 (1-239)(H57Y) VL]::huLLC-C2
QSVLTQPPSVSGAPGQRVTISCTGSSSNIGTGYDVHWYQQLPGTAPKLLIYGNSNRPSGVPDRFSGSKSGTSASLAITGLQAEDEADYYCQSYDSSLSGWVFGGGTRLTVLGQPKANPTVTLFPPSSEELQANKATLVCLISDFYPGAVTVAWKADGSPVKAGVETTKPSKQSNNKYAASSYLSLTPEQWKSHRSYSCQVTHEGSTVEKTVAPTECS

SEQ ID NO: 843 - protein, 217 aa, artificial
  LC [hu anti-<huCDH19> 4F7 (1-239)(H57Y,D110E) VL]::huLLC-C2
QSVLTQPPSVSGAPGQRVTISCTGSSSNIGTGYDVHWYQQLPGTAPKLLIYGNSNRPSGVPDRFSGSKSGTSASLAITGLQAEDEADYYCQSYESSLSGWVFGGGTRLTVLGQPKANPTVTLFPPSSEELQANKATLVCLISDFYPGAVTVAWKADGSPVKAGVETTKPSKQSNNKYAASSYLSLTPEQWKSHRSYSCQVTHEGSTVEKTVAPTECS

SEQ ID NO: 844 - protein, 217 aa, artificial
  LC [hu anti-<huCDH19> 4F7 (1-239)(D110E) VL]::huLLC-C2
QSVLTQPPSVSGAPGQRVTISCTGSSSNIGTGYDVHWYQQLPGTAPKLLIHGNSNRPSGVPDRFSGSKSGTSASLAITGLQAEDEADYYCQSYESSLSGWVFGGGTRLTVLGQPKANPTVTLFPPSSEELQANKATLVCLISDFYPGAVTVAWKADGSPVKAGVETTKPSKQSNNKYAASSYLSLTPEQWKSHRSYSCQVTHEGSTVEKTVAPTECS

SEQ ID NO: 845 - protein, 214 aa, artificial
  LC [hu anti-<huCDH19> 4B10 (1-236)(H45Q,A90T) VL]::huKLC
EIVLTQSPGTLSLSPGERATLSCRASQSVSNTYLAWYQQRPGQAPRLLIYGASSRATGIPDRFSGSGSGTDFTLTISSLEPEDFAVYYCQQYSNSWTFGQGTKVEIKRTVAAPSVFIFPPSDEQLKSGTASVVCLLNNFYPREAKVQWKVDNALQSGNSQESVTEQDSKDSTYSLSSTLTLSKADYEKHKVYACEVTHQGLSSPVTKSFNRGEC

SEQ ID NO: 846 - protein, 214 aa, artificial; identical to SEQ ID NO: 845
  LC [hu anti-<huCDH19> 4B10 (1-236)(H45Q,A90T) VL]::huKLC

SEQ ID NO: 847 - protein, 214 aa, artificial; identical to SEQ ID NO: 845
  LC [hu anti-<huCDH19> 4B10 (1-236)(H45Q,A90T) VL]::huKLC

SEQ ID NO: 848 - protein, 214 aa, artificial; identical to SEQ ID NO: 845
  LC [hu anti-<huCDH19> 4B10 (1-236)(H45Q,A90T) VL]::huKLC

SEQ ID NO: 849 - protein, 217 aa, artificial
  LC [hu anti-<huCDH19> 4A9 (1-239)(F47L) VL]::huLLC-C1
QSVLTQPPSVSGAPGQRVTISCTGSSSNIGTGYAVHWYQQLPGTAPKLLIYGNNNRPSGVPDRFSGSKSGTSASLAITGLQAEDEADYYCQSYDSRLSGWVFGGGTKLTVLGQPKANPTVTLFPPSSEELQANKATLVCLISDFYPGAVTVAWKADGSPVKAGVETTKPSKQSNNKYAASSYLSLTPEQWKSHRSYSCQVTHEGSTVEKTVAPTECS

SEQ ID NO: 850 - protein, 217 aa, artificial; identical to SEQ ID NO: 849
  LC [hu anti-<huCDH19> 4A9 (1-239)(F47L) VL]::huLLC-C1

SEQ ID NO: 851 - protein, 217 aa, artificial
  LC [hu anti-<huCDH19> 4A9 (1-239)(F47L,D110E) VL]::huLLC-C1
QSVLTQPPSVSGAPGQRVTISCTGSSSNIGTGYAVHWYQQLPGTAPKLLIYGNNNRPSGVPDRFSGSKSGTSASLAITGLQAEDEADYYCQSYESRLSGWVFGGGTKLTVLGQPKANPTVTLFPPSSEELQANKATLVCLISDFYPGAVTVAWKADGSPVKAGVETTKPSKQSNNKYAASSYLSLTPEQWKSHRSYSCQVTHEGSTVEKTVAPTECS

SEQ ID NO: 852 - protein, 217 aa, artificial; identical to SEQ ID NO: 851
  LC [hu anti-<huCDH19> 4A9 (1-239)(F47L,D110E) VL]::huLLC-C1

SEQ ID NO: 853 - protein, 216 aa, artificial
  LC [hu anti-<huCDH19> 20D3.1 (1-235)(S102A) VL]::huLLC-C2
QSALTQPPSATGTPGQRVTISCSGSSSNIGSNFVNWYKQLPGTAPKVLIYTNNQRPSGVPDRFSGSKSGTSASLAISGLQSEDEADYYCATWDDSLNGWVFGGGTKLTVLGQPKAAPSVTLFPPSSEELQANKATLVCLISDFYPGAVTVAWKADSSPVKAGVETTTPSKQSNNKYAASSYLSLTPEQWKSHRSYSCQVTHEGSTVEKTVAPTECS

SEQ ID NO: 854 - protein, 216 aa, artificial
  LC [hu anti-<huCDH19> 20D3.1 (1-235)(K45Q,S102A) VL]::huLLC-C2
QSALTQPPSATGTPGQRVTISCSGSSSNIGSNFVNWYQQLPGTAPKVLIYTNNQRPSGVPDRFSGSKSGTSASLAISGLQSEDEADYYCATWDDSLNGWVFGGGTKLTVLGQPKAAPSVTLFPPSSEELQANKATLVCLISDFYPGAVTVAWKADSSPVKAGVETTTPSKQSNNKYAASSYLSLTPEQWKSHRSYSCQVTHEGSTVEKTVAPTECS

SEQ ID NO: 855 - protein, 216 aa, artificial; identical to SEQ ID NO: 854
  LC [hu anti-<huCDH19> 20D3.1 (1-235)(K45Q,S102A) VL]::huLLC-C2

SEQ ID NO: 856 - protein, 216 aa, artificial
  LC [hu anti-<huCDH19> 20D3.1 (1-235)(K45Q,S102A,D111E,N135Q) VL]::huLLC-C2
QSALTQPPSATGTPGQRVTISCSGSSSNIGSNFVNWYQQLPGTAPKVLIYTNNQRPSGVPDRFSGSKSGTSASLAISGLQSEDEADYYCATWDESLQGWVFGGGTKLTVLGQPKAAPSVTLFPPSSEELQANKATLVCLISDFYPGAVTVAWKADSSPVKAGVETTTPSKQSNNKYAASSYLSLTPEQWKSHRSYSCQVTHEGSTVEKTVAPTECS

SEQ ID NO: 857 - protein, 216 aa, artificial
  LC [hu anti-<huCDH19> 20D3.1 (1-235)(W109Y) VL]::huLLC-C2
QSALTQPPSATGTPGQRVTISCSGSSSNIGSNFVNWYKQLPGTAPKVLIYTNNQRPSGVPDRFSGSKSGTSASLAISGLQSEDESDYYCATYDDSLNGWVFGGGTKLTVLGQPKAAPSVTLFPPSSEELQANKATLVCLISDFYPGAVTVAWKADSSPVKAGVETTTPSKQSNNKYAASSYLSLTPEQWKSHRSYSCQVTHEGSTVEKTVAPTECS

SEQ ID NO: 858 - protein, 214 aa, artificial; identical to SEQ ID NO: 700
  LC [hu anti-<huCDH19> 22G10.1 VL]::huKLC

SEQ ID NO: 859 - protein, 214 aa, artificial; identical to SEQ ID NO: 700
  LC [hu anti-<huCDH19> 22G10.1 VL]::huKLC

SEQ ID NO: 860 - protein, 214 aa, artificial
  LC [hu anti-<huCDH19> 22G10.1 (1-234)(Q97E,S98P) VL]::huKLC
EIVMTQSPVTLSLSLGERATLSCRASQSISSNLAWFQQKPGQAPRLLIYGAFTRATGIPARVSGSGSGTEFTLTISSLEPEDFAVYYCQQYNYWPLTFGGGTKVEIKRTVAAPSVFIFPPSDEQLKSGTASVVCLLNNFYPREAKVQWKVDNALQSGNSQESVTEQDSKDSTYSLSSTLTLSKADYEKHKVYACEVTHQGLSSPVTKSFNRGEC

SEQ ID NO: 861 - protein, 214 aa, artificial
  LC [hu anti-<huCDH19> 22G10.1 (1-234)(V78F,Q97E,S98P) VL]::huKLC
EIVMTQSPVTLSLSLGERATLSCRASQSISSNLAWFQQKPGQAPRLLIYGAFTRATGIPARFSGSGSGTEFTLTISSLEPEDFAVYYCQQYNYWPLTFGGGTKVEIKRTVAAPSVFIFPPSDEQLKSGTASVVCLLNNFYPREAKVQWKVDNALQSGNSQESVTEQDSKDSTYSLSSTLTLSKADYEKHKVYACEVTHQGLSSPVTKSFNRGEC

SEQ ID NO: 862 - protein, 214 aa, artificial; identical to SEQ ID NO: 861
  LC [hu anti-<huCDH19> 22G10.1 (1-234)(V78F,Q97E,S98P) VL]::huKLC

SEQ ID NO: 863 - protein, 214 aa, artificial; identical to SEQ ID NO: 700
  LC [hu anti-<huCDH19> 22G10.1 VL]::huKLC

SEQ ID NO: 864 - protein, 215 aa, artificial
  LC [hu anti-<huCDH19> 16A4.1 (1-235)(G141Q) VL]::huKLC
EIVLTQSPGTLSLSPGERATLSCRASQSVSSSYLAWYQQKPGQAPRLLIYGTSSRATGIPDRFSGSGSGTDFTLTISRLEPEDFAVYYCQQYGSSPFTFGQGTKVEIKRTVAAPSVFIFPPSDEQLKSGTASVVCLLNNFYPREAKVQWKVDNALQSGNSQESVTEQDSKDSTYSLSSTLTLSKADYEKHKVYACEVTHQGLSSPVTKSFNRGEC

SEQ ID NO: 865 - protein, 216 aa, artificial
  LC [hu anti-<huCDH19> 19B5.1 (1-235)(K45Q,S102A) VL]::huLLC-C2
QSALTQPPSTTGTPGQRVTISCSGSRSNIGSNFVNWYQQLPGTAPKVLIYTNNQRPSGVPDRFSGSKSGTSASLAISGLQSEDEADYYCATWDDSMNGWVFGGGTKLTVLGQPKAAPSVTLFPPSSEELQANKATLVCLISDFYPGAVTVAWKADSSPVKAGVETTTPSKQSNNKYAASSYLSLTPEQWKSHRSYSCQVTHEGSTVEKTVAPTECS

SEQ ID NO: 866 - protein, 216 aa, artificial; identical to SEQ ID NO: 865
  LC [hu anti-<huCDH19> 19B5.1 (1-235)(K45Q,S102A) VL]::huLLC-C2

SEQ ID NO: 867 - protein, 216 aa, artificial
  LC [hu anti-<huCDH19> 19B5.1 (1-235)(T11V,K45Q,S102A) VL]::huLLC-C2
QSALTQPPSVTGTPGQRVTISCSGSRSNIGSNFVNWYQQLPGTAPKVLIYTNNQRPSGVPDRFSGSKSGTSASLAISGLQSEDEADYYCATWDDSMNGWVFGGGTKLTVLGQPKAAPSVTLFPPSSEELQANKATLVCLISDFYPGAVTVAWKADSSPVKAGVETTTPSKQSNNKYAASSYLSLTPEQWKSHRSYSCQVTHEGSTVEKTVAPTECS

SEQ ID NO: 868 - protein, 216 aa, artificial
  LC [hu anti-<huCDH19> 19B5.1 (1-235)(T11V,K45Q,S102A,D111E,N135Q) VL]::huLLC-C2
QSALTQPPSVTGTPGQRVTISCSGSRSNIGSNFVNWYQQLPGTAPKVLIYTNNQRPSGVPDRFSGSKSGTSASLAISGLQSEDEADYYCATWDESMQGWVFGGGTKLTVLGQPKAAPSVTLFPPSSEELQANKATLVCLISDFYPGAVTVAWKADSSPVKAGVETTTPSKQSNNKYAASSYLSLTPEQWKSHRSYSCQVTHEGSTVEKTVAPTECS

SEQ ID NO: 869 - protein, 216 aa, artificial
  LC [hu anti-<huCDH19> 19B5.1 (1-235)(T11V,K45Q,S102A,W109Y,D111E,N135Q) VL]::huLLC-C2
QSALTQPPSVTGTPGQRVTISCSGSRSNIGSNFVNWYQQLPGTAPKVLIYTNNQRPSGVPDRFSGSKSGTSASLAISGLQSEDEADYYCATYDESMQGWVFGGGTKLTVLGQPKAAPSVTLFPPSSEELQANKATLVCLISDFYPGAVTVAWKADSSPVKAGVETTTPSKQSNNKYAASSYLSLTPEQWKSHRSYSCQVTHEGSTVEKTVAPTECS

SEQ ID NO: 870 - protein, 212 aa, artificial
  LC [hu anti-<huCDH19> 23A10.3 (1-231)(C42S) VL]::huLLC-C2
SYELTQPPSVSVSPGQTASITCSGDRLGEKYVSWYQQKPGQSPILVIYQDNKWPSGIPERFSGSNSGNTATLTISGTQAMDEADYYCQAWDSSTVVFGGGTKLTVLGQPKAAPSVTLFPPSSEELQANKATLVCLISDFYPGAVTVAWKADSSPVKAGVETTTPSKQSNNKYAASSYLSLTPEQWKSHRSYSCQVTHEGSTVEKTVAPTECS

SEQ ID NO: 871 - protein, 212 aa, artificial; identical to SEQ ID NO: 870
  LC [hu anti-<huCDH19> 23A10.3 (1-231)(C42S) VL]::huLLC-C2

SEQ ID NO: 872 - protein, 212 aa, artificial
  LC [hu anti-<huCDH19> 23A10.3 (1-231)(C42S,D110E) VL]::huLLC-C2
SYELTQPPSVSVSPGQTASITCSGDRLGEKYVSWYQQKPGQSPILVIYQDNKWPSGIPERFSGSNSGNTATLTISGTQAMDEADYYCQAWESSTVVFGGGTKLTVLGQPKAAPSVTLFPPSSEELQANKATLVCLISDFYPGAVTVAWKADSSPVKAGVETTTPSKQSNNKYAASSYLSLTPEQWKSHRSYSCQVTHEGSTVEKTVAPTECS

SEQ ID NO: 873 - protein, 212 aa, artificial
  LC [hu anti-<huCDH19> 23A10.3 (1-231)(C42Y) VL]::huLLC-C2
SYELTQPPSVSVSPGQTASITCSGDRLGEKYVYWYQQKPGQSPILVIYQDNKWPSGIPERFSGSNSGNTATLTISGTQAMDEADYYCQAWDSSTVVFGGGTKLTVLGQPKAAPSVTLFPPSSEELQANKATLVCLISDFYPGAVTVAWKADSSPVKAGVETTTPSKQSNNKYAASSYLSLTPEQWKSHRSYSCQVTHEGSTVEKTVAPTECS

SEQ ID NO: 874 - protein, 215 aa, artificial
  LC [hu anti-<huCDH19> 25G10.1 (1-235)(H105Y) VL]::huKLC
EIVLTQSPGTLSLSPGERATLSCRASQSVSSSYLAWYQQKPGQAPRLLIFGASSRATGIPDRFSGSGSGTDFTLTISRLEPEDFAVYYCQQYGNSPLTFGGGTKVEIKRTVAAPSVFIFPPSDEQLKSGTASVVCLLNNFYPREAKVQWKVDNALQSGNSQESVTEQDSKDSTYSLSSTLTLSKADYEKHKVYACEVTHQGLSSPVTKSFNRGEC

SEQ ID NO: 875 - protein, 215 aa, artificial; identical to SEQ ID NO: 874
  LC [hu anti-<huCDH19> 25G10.1 (1-235)(H105Y) VL]::huKLC

SEQ ID NO: 876 - protein, 216 aa, artificial
  LC [hu anti-<huCDH19> 26D1.1 (1-235)(S7P) VL]::huLLC-C2
HSVLTQPPSASGTPGQRVTISCSGSRSNIGSNFVNWYQQLPGTAPKLLIYTNNQRPSGVPDRFSGSKSGTSASLAISGLQSEDEADYYCAVWDDSLNGWVFGGGTKLTVLGQPKAAPSVTLFPPSSEELQANKATLVCLISDFYPGAVTVAWKADSSPVKAGVETTTPSKQSNNKYAASSYLSLTPEQWKSHRSYSCQVTHEGSTVEKTVAPTECS

SEQ ID NO: 877 - protein, 216 aa, artificial
  LC [hu anti-<huCDH19> 26D1.1 (1-235)(H1Q,S7P) VL]::huLLC-C2
QSVLTQPPSASGTPGQRVTISCSGSRSNIGSNFVNWYQQLPGTAPKLLIYTNNQRPSGVPDRFSGSKSGTSASLAISGLQSEDEADYYCAVWDDSLNGWVFGGGTKLTVLGQPKAAPSVTLFPPSSEELQANKATLVCLISDFYPGAVTVAWKADSSPVKAGVETTTPSKQSNNKYAASSYLSLTPEQWKSHRSYSCQVTHEGSTVEKTVAPTECS

SEQ ID NO: 878 - protein, 216 aa, artificial
  LC [hu anti-<huCDH19> 26D1.1 (1-235)(H1Q,S7P,W109Y) VL]::huLLC-C2
QSVLTQPPSASGTPGQRVTISCSGSRSNIGSNFVNWYQQLPGTAPKLLIYTNNQRPSGVPDRFSGSKSGTSASLAISGLQSEDEADYYCAVYDDSLNGWVFGGGTKLTVLGQPKAAPSVTLFPPSSEELQANKATLVCLISDFYPGAVTVAWKADSSPVKAGVETTTPSKQSNNKYAASSYLSLTPEQWKSHRSYSCQVTHEGSTVEKTVAPTECS

SEQ ID NO: 879 - protein, 216 aa, artificial
  LC [hu anti-<huCDH19> 26D1.1 (1-235)(H1Q,S7P,W109Y,D111E,N135Q) VL]::huLLC-C2
QSVLTQPPSASGTPGQRVTISCSGSRSNIGSNFVNWYQQLPGTAPKLLIYTNNQRPSGVPDRFSGSKSGTSASLAISGLQSEDEADYYCAVYDESLQGWVFGGGTKLTVLGQPKAAPSVTLFPPSSEELQANKATLVCLISDFYPGAVTVAWKADSSPVKAGVETTTPSKQSNNKYAASSYLSLTPEQWKSHRSYSCQVTHEGSTVEKTVAPTECS

SEQ ID NO: 880 - protein, 216 aa, artificial; identical to SEQ ID NO: 879
  LC [hu anti-<huCDH19> 26D1.1 (1-235)(H1Q,S7P,W109Y,D111E,N135Q) VL]::huLLC-C2

SEQ ID NO: 881 - protein, 216 aa, artificial; identical to SEQ ID NO: 877
  LC [hu anti-<huCDH19> 26D1.1 (1-235)(H1Q,S7P) VL]::huLLC-C2

SEQ ID NO: 882 - protein, 216 aa, artificial
  LC [hu anti-<huCDH19> 26F12.1 (1-235)(S7P) VL]::huLLC-C2
QSVLTQPPSASGTPGQKVTISCSGSRSNIGSNFVNWYQQLPGTAPKLLIYTNYQRPSGVPDRFSGSKSGTSASLAISGLQSEDEADYYCAVWDDSLNGWVFGGGTKLTVLGQPKAAPSVTLFPPSSEELQANKATLVCLISDFYPGAVTVAWKADSSPVKAGVETTTPSKQSNNKYAASSYLSLTPEQWKSHRSYSCQVTHEGSTVEKTVAPTECS

SEQ ID NO: 883 - protein, 216 aa, artificial
  LC [hu anti-<huCDH19> 26F12.1 (1-235)(S7P,D111E) VL]::huLLC-C2
QSVLTQPPSASGTPGQKVTISCSGSRSNIGSNFVNWYQQLPGTAPKLLIYTNYQRPSGVPDRFSGSKSGTSASLAISGLQSEDEADYYCAVWDESLNGWVFGGGTKLTVLGQPKAAPSVTLFPPSSEELQANKATLVCLISDFYPGAVTVAWKADSSPVKAGVETTTPSKQSNNKYAASSYLSLTPEQWKSHRSYSCQVTHEGSTVEKTVAPTECS

SEQ ID NO: 884 - protein, 216 aa, artificial; identical to SEQ ID NO: 883
  LC [hu anti-<huCDH19> 26F12.1 (1-235)(S7P,D111E) VL]::huLLC-C2

SEQ ID NO: 885 - protein, 216 aa, artificial
  LC [hu anti-<huCDH19> 26F12.1 (1-235)(S7P,W109Y,D111E,N135Q) VL]::huLLC-C2
QSVLTQPPSASGTPGQKVTISCSGSRSNIGSNFVNWYQQLPGTAPKLLIYTNYQRPSGVPDRFSGSKSGTSASLAISGLQSEDEADYYCAVYDESLQGWVFGGGTKLTVLGQPKAAPSVTLFPPSSEELQANKATLVCLISDFYPGAVTVAWKADSSPVKAGVETTTPSKQSNNKYAASSYLSLTPEQWKSHRSYSCQVTHEGSTVEKTVAPTECS

SEQ ID NO: 886 - protein, 216 aa, artificial
  LC [hu anti-<huCDH19> 25F8.1 (1-235)(K45Q) VL]::huLLC-C2
QSALTQPPSATGTPGQRVTISCSGSSSNIGRNFVNWYQQLPGTAPKVLIYTNNQRPSGVPDRFSGSKSGTSASLAISGLQSEDESDYYCAAWDDSLNGWVFGGGTKLTVLGQPKAAPSVTLFPPSSEELQANKATLVCLISDFYPGAVTVAWKADSSPVKAGVETTTPSKQSNNKYAASSYLSLTPEQWKSHRSYSCQVTHEGSTVEKTVAPTECS

SEQ ID NO: 887 - protein, 216 aa, artificial
  LC [hu anti-<huCDH19> 25F8.1 (1-235)(K45Q,S102A) VL]::huLLC-C2
QSALTQPPSATGTPGQRVTISCSGSSSNIGRNFVNWYQQLPGTAPKVLIYTNNQRPSGVPDRFSGSKSGTSASLAISGLQSEDEADYYCAAWDDSLNGWVFGGGTKLTVLGQPKAAPSVTLFPPSSEELQANKATLVCLISDFYPGAVTVAWKADSSPVKAGVETTTPSKQSNNKYAASSYLSLTPEQWKSHRSYSCQVTHEGSTVEKTVAPTECS

SEQ ID NO: 888 - protein, 216 aa, artificial; identical to SEQ ID NO: 887
  LC [hu anti-<huCDH19> 25F8.1 (1-235)(K45Q,S102A) VL]::huLLC-C2

SEQ ID NO: 889 - protein, 216 aa, artificial
  LC [hu anti-<huCDH19> 25F8.1 (1-235)(K45Q,S102A,D111E) VL]::huLLC-C2
QSALTQPPSATGTPGQRVTISCSGSSSNIGRNFVNWYQQLPGTAPKVLIYTNNQRPSGVPDRFSGSKSGTSASLAISGLQSEDEADYYCAAWDESLNGWVFGGGTKLTVLGQPKAAPSVTLFPPSSEELQANKATLVCLISDFYPGAVTVAWKADSSPVKAGVETTTPSKQSNNKYAASSYLSLTPEQWKSHRSYSCQVTHEGSTVEKTVAPTECS

SEQ ID NO: 890 - protein, 216 aa, artificial
  LC [hu anti-<huCDH19> 25F8.1 (1-235)(K45Q,S102A,D111E,N135Q) VL]::huLLC-C2
QSALTQPPSATGTPGQRVTISCSGSSSNIGRNFVNWYQQLPGTAPKVLIYTNNQRPSGVPDRFSGSKSGTSASLAISGLQSEDEADYYCAAWDESLQGWVFGGGTKLTVLGQPKAAPSVTLFPPSSEELQANKATLVCLISDFYPGAVTVAWKADSSPVKAGVETTTPSKQSNNKYAASSYLSLTPEQWKSHRSYSCQVTHEGSTVEKTVAPTECS

SEQ ID NO: 891 - protein, 216 aa, artificial
  LC [hu anti-<huCDH19> 22D1.1 (1-235)(K45Q,S102A) VL]::huLLC-C2
QSALTQPPSATGTPGQRVTISCSGSSSNIGSNFVNWYQQLPGTAPKVLIYTNNQRPSGVPDRFSGSKSGTSASLAISGLQSEDEADYYCATWDDSMNGWVFGGGTKLTVLGQPKAAPSVTLFPPSSEELQANKATLVCLISDFYPGAVTVAWKADSSPVKAGVETTTPSKQSNNKYAASSYLSLTPEQWKSHRSYSCQVTHEGSTVEKTVAPTECS

SEQ ID NO: 892 - protein, 216 aa, artificial
  LC [hu anti-<huCDH19> 22D1.1 (1-235)(K45Q,S102A,D111E,N135Q) VL]::huLLC-C2
QSALTQPPSATGTPGQRVTISCSGSSSNIGSNFVNWYQQLPGTAPKVLIYTNNQRPSGVPDRFSGSKSGTSASLAISGLQSEDEADYYCATWDESMQGWVFGGGTKLTVLGQPKAAPSVTLFPPSSEELQANKATLVCLISDFYPGAVTVAWKADSSPVKAGVETTTPSKQSNNKYAASSYLSLTPEQWKSHRSYSCQVTHEGSTVEKTVAPTECS

SEQ ID NO: 893 - protein, 216 aa, artificial
  LC [hu anti-<huCDH19> 22D1.1 (1-235)(K45Q,S102A,W109Y,D111E,N135Q) VL]::huLLC-C2
QSALTQPPSATGTPGQRVTISCSGSSSNIGSNFVNWYQQLPGTAPKVLIYTNNQRPSGVPDRFSGSKSGTSASLAISGLQSEDEADYYCATYDESMQGWVFGGGTKLTVLGQPKAAPSVTLFPPSSEELQANKATLVCLISDFYPGAVTVAWKADSSPVKAGVETTTPSKQSNNKYAASSYLSLTPEQWKSHRSYSCQVTHEGSTVEKTVAPTECS

SEQ ID NO: 894 - protein, 216 aa, artificial
  LC [hu anti-<huCDH19> 22D1.1 (1-235)(K45Q,S102A,W109Y) VL]::huLLC-C2
QSALTQPPSATGTPGQRVTISCSGSSSNIGSNFVNWYQQLPGTAPKVLIYTNNQRPSGVPDRFSGSKSGTSASLAISGLQSEDEADYYCATYDDSMNGWVFGGGTKLTVLGQPKAAPSVTLFPPSSEELQANKATLVCLISDFYPGAVTVAWKADSSPVKAGVETTTPSKQSNNKYAASSYLSLTPEQWKSHRSYSCQVTHEGSTVEKTVAPTECS

SEQ ID NO: 895 - protein, 216 aa, artificial; identical to SEQ ID NO: 891
  [hu anti-<huCDH19> 22D1.1 (1-235)(K45Q,S102A) VL]::huLLC-C2

SEQ ID NO: 896 - protein, 217 aa, artificial; identical to SEQ ID NO: 686
  LC [hu anti-<huCDH19> 4F7 VL]::huLLC-C1

SEQ ID NO: 897 - protein, 212 aa, artificial
  LC [hu anti-<huCDH19> 2G6 (1-234)(D110E) VL]::huLLC-C1
SYELTQPPSVSVSPGQTASITCSGDRLGEKYTCWYQQRPGQSPLLVIYQDTKRPSGIPERFSGSNSGNTATLTISGTQAMDEADYYCQAWESSTVVFGGGTKLTVLGQPKANPTVTLFPPSSEELQANKATLVCLISDFYPGAVTVAWKADGSPVKAGVETTKPSKQSNNKYAASSYLSLTPEQWKSHRSYSCQVTHEGSTVEKTVAPTECS

SEQ ID NO: 898 - protein, 212 aa, artificial; identical to SEQ ID NO: 832
  LC [hu anti-<huCDH19> 2G6 (1-234)(C42S,D110E) VL]::huLLC-C1

SEQ ID NO: 899 - protein, 212 aa, artificial; identical to SEQ ID NO: 832
  LC [hu anti-<huCDH19> 2G6 (1-234)(C42S,D110E) VL]::huLLC-C1

SEQ ID NO: 900 - protein, 212 aa, artificial; identical to SEQ ID NO: 870
  LC [hu anti-<huCDH19> 23A10.3 (1-231)(C42S) VL]::huLLC-C2

SEQ ID NO: 901 - protein, 17 aa, artificial
  14039, 14303 - CDR-H2
FIWYEGSNKYYAESVKD

SEQ ID NO: 902 - protein, 10 aa, artificial
  14027 - CDR-H3
EGSSGWYFQY

SEQ ID NO: 903 - protein, 10 aa, artificial
  CDR-H3
EGSSGYYFQY

SEQ ID NO: 904 - protein, 8 aa, artificial
  14059 - CDR-H3
NYAFHFDF

SEQ ID NO: 905 - protein, 17 aa, artificial
  CDR-H2
VISYEGTNEYYAESVKG

SEQ ID NO: 906 - protein, 10 aa, artificial
  CDR-H3
ERYFDYSFDY

SEQ ID NO: 907 - protein, 17 aa, artificial
  CDR-H2
VIWYEGSNKYYAESVRG

SEQ ID NO: 908 - protein, 10 aa, artificial
  CDR-H3
ETGEGYYFDL

SEQ ID NO: 909 - protein, 8 aa, artificial
  CDR-H3
NYAFHFDY

SEQ ID NO: 910 - protein, 14 aa, artificial
  CDR-H3
ESRYRSGWYDAFDI

SEQ ID NO: 911 - protein, 14 aa, artificial
  CDR-H3
ESRYRSGYYDAFDI

SEQ ID NO: 912 - protein, 12 aa, artificial
  CDR-H3
EGSSGWYRWFDP

SEQ ID NO: 913 - protein, 12 aa, artificial
  CDR-H3
DGSSGYYRYFDP

SEQ ID NO: 914 - protein, 17 aa, artificial
  CDR-H2
TISGGGANTYYAESVKG

SEQ ID NO: 915 - protein, 11 aa, artificial
  CDR-H3
GGIQLYLHFDY

SEQ ID NO: 916 - protein, 11 aa, artificial
  CDR-H3
GGIQLYLHLDY

SEQ ID NO: 917 - protein, 11 aa, artificial
  CDR-H3
GGIQLYLHFDY

SEQ ID NO: 918 - protein, 11 aa, artificial
  CDR-H3
GGIQLYLHFDY

SEQ ID NO: 919 - protein, 11 aa, artificial
  CDR-H3
GGIKLYLHFDY

SEQ ID NO: 920 - protein, 12 aa, artificial
  CDR-H3
EGSSGYYRYFDP

SEQ ID NO: 921 - protein, 17 aa, artificial
  CDR-H2
VIWYEGSNKYYAESVKG

SEQ ID NO: 922 - protein, 11 aa, artificial
  CDR-L1
SGDRLGEKYTS

SEQ ID NO: 923 - protein, 9 aa, artificial
  CDR-L3
QAWESSTVV

SEQ ID NO: 924 - protein, 12 aa, artificial
  CDR-L1
RASRQISSSYLA

SEQ ID NO: 925 - protein, 12 aa, artificial
  CDR-L1
RASQSISSSYLA

SEQ ID NO: 926 - protein, 11 aa, artificial
  CDR-L3
QSYESRLSGWV

SEQ ID NO: 927 - protein, 11 aa, artificial
  CDR-L3
QSYESSLSGWV

SEQ ID NO: 928 - protein, 11 aa, artificial
  CDR-L3
ATWDESLQGWV

SEQ ID NO: 929 - protein, 11 aa, artificial
  CDR-L3
ATYDDSLNGWV

SEQ ID NO: 930 - protein, 11 aa, artificial
  CDR-L3
ATWDESMQGWV

SEQ ID NO: 931 - protein, 11 aa, artificial
  CDR-L3
ATYDESMQGWV

SEQ ID NO: 932 - protein, 11 aa, artificial
  CDR-L3
ATYDDSMNGWV

SEQ ID NO: 933 - protein, 11 aa, artificial
  CDR-L3
AAWDESLNGWV

SEQ ID NO: 934 - protein, 11 aa, artificial
  CDR-L3
AAWDESLQGWV

SEQ ID NO: 935 - protein, 11 aa, artificial
  CDR-L3
AVWDESLNGWV

SEQ ID NO: 936 - protein, 11 aa, artificial
  CDR-L3
AVYDESLQGWV

SEQ ID NO: 937 - protein, 11 aa, artificial
  CDR-L3
AVYDDSLNGWV

SEQ ID NO: 938 - protein, 11 aa, artificial
  CDR-L3
AVYDESLQGWV

SEQ ID NO: 939 - protein, 11 aa, artificial
  CDR-L1
SGDRLGEKYVS

SEQ ID NO: 940 - protein, 9 aa, artificial
  CDR-L3
QAWESSTVV

SEQ ID NO: 941 - protein, 11 aa, artificial
  CDR-L1
SGDRLGEKYVY

SEQ ID NO: 942 - protein, 11 aa, artificial
  CDR-L3
ATWDESMQGWV

SEQ ID NO: 943 - protein, 11 aa, artificial
  CDR-L3
ATYDESMQGWV

SEQ ID NO: 944 - protein, 772 aa, human
MNCYLLLRFMLGIPLLWPCLGATENSQTKKVKQPVRSHLRVKRGWVWNQFFVPEEMNTTSHHIGQLRSDLDNGNNSFQYKLLGAGAGSTFIIDERTGDIYAIQKLDREERSLYILRAQVIDIATGRAVEPESEFVIKVSDINDNEPKFLDEPYEAIVPEMSPEGTLVIQVTASDADDPSSGNNARLLYSLLQGQPYFSVEPTTGVIRISSKMDRELQDEYWVIIQAKDMIGQPGALSGTTSVLIKLSDVNDNKPIFKESLYRLTVSESAPTGTSIGTIMAYDNDIGENAEMDYSIEEDDSQTFDIITNHETQEGIVILKKKVDFEHQNHYGIRAKVKNHHVPEQLMKYHTEASTTFIKIQVEDVDEPPLFLLPYYVFEVFEETPQGSFVGVVSATDPDNRKSPIRYSITRSKVFNINDNGTITTSNSLDREISAWYNLSITATEKYNIEQISSIPLYVQVLNINDHAPEFSQYYETYVCENAGSGQVIQTISAVDRDESIEEHHFYFNLSVEDTNNSSFTIIDNQDNTAVILTNRTGFNLQEEPVFYISILIADNGIPSLTSTNTLTIHVCDCGDSGSTQTCQYQELVLSMGFKTEVIIAILICIMIIFGFIFLTLGLKQRRKQILFPEKSEDFRENIFQYDDEGGGEEDTEAFDIAELRSSTIMRERKTRKTTSAEIRSLYRQSLQVGPDSAIFRKFILEKLEEANTDPCAPPFDSLQTYAFEGTGSLAGSLSSLESAVSDQDESYDYLNELGPRFKRLACMFGSAVQSNN

SEQ ID NO: 945 - DNA, 2319 bp, human
atgaactgttatttactgctgcgttttatgttgggaattcctctcctatggccttgtcttggagcaacagaaaactctcaaacaaagaaagtcaagcagccagtgcgatctcatttgagagtgaagcgtggctgggtgtggaaccaattttttgtaccagaggaaatgaatacgactagtcatcacatcggccagctaagatctgatttagacaatggaaacaattctttccagtacaagcttttgggagctggagctggaagtacttttatcattgatgaaagaacaggtgacatatatgccatacagaagcttgatagagaggagcgatccctctacatcttaagagcccaggtaatagacatcgctactggaagggctgtggaacctgagtctgagtttgtcatcaaagtttcggatatcaatgacaatgaaccaaaattcctagatgaaccttatgaggccattgtaccagagatgtctccagaaggaacattagttatccaggtgacagcaagtgatgctgacgatccctcaagtggtaataatgctcgtctcctctacagcttacttcaaggccagccatatttttctgttgaaccaacaacaggagtcataagaatatcttctaaaatggatagagaactgcaagatgagtattgggtaatcattcaagccaaggacatgattggtcagccaggagcgttgtctggaacaacaagtgtattaattaaactttcagatgttaatgacaataagcctatatttaaagaaagtttataccgcttgactgtctctgaatctgcacccactgggacttctataggaacaatcatggcatatgataatgacataggagagaatgcagaaatggattacagcattgaagaggatgattcgcaaacatttgacattattactaatcatgaaactcaagaaggaatagttatattaaaaaagaaagtggattttgagcaccagaaccactacggtattagagcaaaagttaaaaaccatcatgttcctgagcagctcatgaagtaccacactgaggcttccaccactttcattaagatccaggtggaagatgttgatgagcctcctcttttcctccttccatattatgtatttgaagtttttgaagaaaccccacagggatcatttgtaggcgtggtgtctgccacagacccagacaataggaaatctcctatcaggtattctattactaggagcaaagtgttcaatatcaatgataatggtacaatcactacaagtaactcactggatcgtgaaatcagtgcttggtacaacctaagtattacagccacagaaaaatacaatatagaacagatctcttcgatcccactgtatgtgcaagttcttaacatcaatgatcatgctcctgagttctctcaatactatgagacttatgtttgtgaaaatgcaggctctggtcaggtaattcagactatcagtgcagtggatagagatgaatccatagaagagcaccatttttactttaatctatctgtagaagacactaacaattcaagttttacaatcatagataatcaagataacacagctgtcattttgactaatagaactggttttaaccttcaagaagaacctgtcttctacatctccatcttaattgccgacaatggaatcccgtcacttacaagtacaaacacccttaccatccatgtctgtgactgtggtgacagtgggagcacacagacctgccagtaccaggagcttgtgctttccatgggattcaagacagaagtcatcattgctattctcatttgcattatgatcatatttgggtttatttttttgactttgggtttaaaacaacggagaaaacagattctatttcctgagaaaagtgaagatttcagagagaatatattccaatatgatgatgaagggggtggagaagaagatacagaggcctttgatatagcagagctgaggagtagtaccataatgcgggaacgcaagactcggaaaaccacaagcgctgagatcaggagcctatacaggcagtctttgcaagttggccccgacagtgccatattcaggaaattcattctggaaaagctcgaagaagctaatactgatccgtgtgcccctccttttgattccctccagacctacgcttttgagggaacagggtcattagctggatccctgagctccttagaatcagcagtctctgatcaggatgaaagctatgattaccttaatgagttgggacctcgctttaaaagattagcatgcatgtttggttctgcagtgcagtcaaataattag

SEQ ID NO: 946 - protein, 772 aa, cynomolgus
MNCYLLLPFMLGIPLLWPCLGATENSQTKKVQQPVGSHLRVKRGWVWNQFFVPEEMNTTSHHVGRLRSDLDNGNNSFQYKLLGAGAGSTFIIDERTGDIYAIEKLDREERSLYILRAQVIDITTGRAVEPESEFVIKVSDINDNEPKFLDEPYEAIVPEMSPEGTLVIQVTASDADDPSSGNNARLLYSLLQGQPYFSVEPTTGVIRISSKMDRELQDEYWVIIQAKDMIGQPGALSGTTSVLIKLSDVNDNKPIFKESLYRLTVSESAPTGTSIGTIMAYDNDIGENAEMDYSIEEDDSQTFDIITNHETQEGIVILKKKVNFEHQNHYGIRAKVKNHHVDEQLMKYHTEASTTFIKIQVEDVDEPPLFLLPYYIFEIFEETPQGSFVGVVSATDPDNRKSPIRYSITRSKVFNIDDNGTITTTNSLDREISAWYNLSITATEKYNIEQISSIPVYVQVLNINDHAPEFSQYYESYVCENAGSGQVIQTISAVDRDESIEEHHFYFNLSVEDTNSSSFTIIDNQDNTAVILTNRTGFNLQEEPIFYISILIADNGIPSLTSTNTLTIHVCDCDDSGSTQTCQYQELMLSMGFKTEVIIAILICIMVIFGFIFLTLGLKQRRKQILFPEKSEDFRENIFRYDDEGGGEEDTEAFDVAALRSSTIMRERKTRKTTSAEIRSLYRQSLQVGPDSAIFRKFILEKLEEADTDPCAPPFDSLQTYAFEGTGSLAGSLSSLESAVSDQDESYDYLNELGPRFKRLACMFGSAVQSNN

SEQ ID NO: 947 - DNA, 2319 bp, cynomolgus
atgaattgttatttactgctgccttttatgttgggaattcctctcctatggccttgtcttggagcaacagaaaactctcaaacaaagaaagtccagcagccagtaggatctcatctgagagtgaagcgtggctgggtgtggaaccaattttttgtaccagaggaaatgaatacgactagtcatcacgttggccggctaagatctgatttagacaatggaaacaattctttccagtacaagcttttgggagctggagctggaagtacttttatcattgatgaaagaacaggtgacatatatgccatagagaagcttgatagagaggagcgatccctctacatcttaagagcccaggtaatagacatcactactggaagggctgtggaacctgagtctgagtttgtcatcaaagtttcggatatcaatgacaatgaaccaaaattcctagatgaaccttatgaggccattgtaccagagatgtctccagaaggaacattagtcatccaggtgacagcaagtgatgctgatgacccttcaagtggtaataatgctcgtctcctctacagcttattacaaggccagccatatttttctgttgaaccaacaacaggagtcataagaatatcttctaaaatggatagagaactgcaagatgagtattgggtaatcattcaagccaaggacatgattggtcagccaggagcgttgtctggaacaacgagtgtattaattaaactttcagatgttaatgacaataagcctatatttaaagaaagtttataccgcctgacggtctctgaatctgcacccactgggacttctataggaacaatcatggcatatgataatgacataggagagaatgcagaaatggattacagcattgaagaggatgattcacagacatttgacattattactaatcatgaaactcaagaaggaatagttatattaaaaaagaaagtgaattttgagcaccagaaccactatggtattagagcaaaagttaaaaaccatcatgttgatgagcagctcatgaaataccacactgaagcttccaccactttcattaagatccaggtggaagatgttgatgagcctcctcttttcctccttccgtattacatatttgaaatttttgaagaaaccccacaaggatcatttgtaggcgtggtgtctgccacagacccagacaataggaaatctcctatcaggtattctattactaggagcaaagtgttcaatatcgatgataatggtacaatcactacaactaactcactggatcgggaaatcagtgcttggtacaacctaagtattacagccacagaaaaatacaatatagagcagatctcttcgatcccagtgtatgtgcaagttcttaatatcaatgatcatgctcctgagttctctcaatactatgagagttatgtttgtgaaaatgcaggctctggtcaggtaattcagactatcagtgcagtggatagagatgaatccatagaagagcaccatttttactttaatctatctgtagaagacactaactcttcaagttttacaatcatagacaatcaagataacacagctgtcattttgactaatagaactggttttaaccttcaagaagagcccatcttctacatctccatcttaattgccgacaatggaatcccgtcacttacaagtacaaacacccttaccatccatgtctgtgactgtgatgacagtgggagcacacagacctgccagtaccaggagcttatgctttccatgggattcaagacagaagtcatcattgctattctcatttgcattatggtaatatttgggtttatttttttgactttgggtttaaaacaacggagaaaacagattctatttcctgagaaaagtgaagatttcagagagaatatattccgatatgatgacgaagggggtggagaagaagatacagaggcctttgacgtagcagcgctgaggagtagcaccataatgcgggaacgcaagactcggaaaaccaccagcgctgagatcaggagcctatacaggcagtctttgcaagttggccccgacagtgccatattcaggaagttcatcctggaaaagctcgaagaagctgatactgatccgtgtgcccctccttttgattccctccagacctacgcttttgagggaacagggtcattagctggatccctgagctccttagaatcagctgtctctgatcaggatgaaagctatgattaccttaacgagttgggacctcgctttaaaagattagcatgcatgtttggttctgcagtgcagtcaaataattag

SEQ ID NO: 948 - protein, 596 aa, human
MNCYLLLRFMLGIPLLWPCLGATENSQTKKVKQPVRSHLRVKRGWVWNQFFVPEEMNTTSHHIGQLRSDLDNGNNSFQYKLLGAGAGSTFIIDERTGDIYAIQKLDREERSLYILRAQVIDIATGRAVEPESEFVIKVSDINDNEPKFLDEPYEAIVPEMSPEGTLVIQVTASDADDPSSGNNARLLYSLLQGQPYFSVEPTTGVIRISSKMDRELQDEYWVIIQAKDMIGQPGALSGTTSVLIKLSDVNDNKPIFKESLYRLTVSESAPTGTSIGTIMAYDNDIGENAEMDYSIEEDDSQTFDIITNHETQEGIVILKKKVDFEHQNHYGIRAKVKNHHVPEQLMKYHTEASTTFIKIQVEDVDEPPLFLLPYYVFEVFEETPQGSFVGVVSATDPDNRKSPIRYSITRSKVFNINDNGTITTSNSLDREISAWYNLSITATEKYNIEQISSIPLYVQVLNINDHAPEFSQYYETYVCENAGSGQVIQTISAVDRDESIEEHHFYFNLSVEDTNNSSFTIIDNQDNTAVILTNRTGFNLQEEPVFYISILIADNGIPSLTSTNTLTIHVCDCGDSGSTQTCQYQELVLSMGFKTE

SEQ ID NO: 949 - DNA, 1788 bp, human
atgaactgttatttactgctgcgttttatgttgggaattcctctcctatggccttgtcttggagcaacagaaaactctcaaacaaagaaagtcaagcagccagtgcgatctcatttgagagtgaagcgtggctgggtgtggaaccaattttttgtaccagaggaaatgaatacgactagtcatcacatcggccagctaagatctgatttagacaatggaaacaattctttccagtacaagcttttgggagctggagctggaagtacttttatcattgatgaaagaacaggtgacatatatgccatacagaagcttgatagagaggagcgatccctctacatcttaagagcccaggtaatagacatcgctactggaagggctgtggaacctgagtctgagtttgtcatcaaagtttcggatatcaatgacaatgaaccaaaattcctagatgaaccttatgaggccattgtaccagagatgtctccagaaggaacattagttatccaggtgacagcaagtgatgctgacgatccctcaagtggtaataatgctcgtctcctctacagcttacttcaaggccagccatatttttctgttgaaccaacaacaggagtcataagaatatcttctaaaatggatagagaactgcaagatgagtattgggtaatcattcaagccaaggacatgattggtcagccaggagcgttgtctggaacaacaagtgtattaattaaactttcagatgttaatgacaataagcctatatttaaagaaagtttataccgcttgactgtctctgaatctgcacccactgggacttctataggaacaatcatggcatatgataatgacataggagagaatgcagaaatggattacagcattgaagaggatgattcgcaaacatttgacattattactaatcatgaaactcaagaaggaatagttatattaaaaaagaaagtggattttgagcaccagaaccactacggtattagagcaaaagttaaaaaccatcatgttcctgagcagctcatgaagtaccacactgaggcttccaccactttcattaagatccaggtggaagatgttgatgagcctcctcttttcctccttccatattatgtatttgaagtttttgaagaaaccccacagggatcatttgtaggcgtggtgtctgccacagacccagacaataggaaatctcctatcaggtattctattactaggagcaaagtgttcaatatcaatgataatggtacaatcactacaagtaactcactggatcgtgaaatcagtgcttggtacaacctaagtattacagccacagaaaaatacaatatagaacagatctcttcgatcccactgtatgtgcaagttcttaacatcaatgatcatgctcctgagttctctcaatactatgagacttatgtttgtgaaaatgcaggctctggtcaggtaattcagactatcagtgcagtggatagagatgaatccatagaagagcaccatttttactttaatctatctgtagaagacactaacaattcaagttttacaatcatagataatcaagataacacagctgtcattttgactaatagaactggttttaaccttcaagaagaacctgtcttctacatctccatcttaattgccgacaatggaatcccgtcacttacaagtacaaacacccttaccatccatgtctgtgactgtggtgacagtgggagcacacagacctgccagtaccaggagcttgtgctttccatgggattcaagacagaa

SEQ ID NO: 950 - protein, 624 aa, human
MNCYLLLRFMLGIPLLWPCLGATENSQTKKVKQPVRSHLRVKRGWVWNQFFVPEEMNTTSHHIGQLRSDLDNGNNSFQYKLLGAGAGSTFIIDERTGDIYAIQKLDREERSLYILRAQVIDIATGRAVEPESEFVIKVSDINDNEPKFLDEPYEAIVPEMSPEGTLVIQVTASDADDPSSGNNARLLYSLLQGQPYFSVEPTTGVIRISSKMDRELQDEYWVIIQAKDMIGQPGALSGTTSVLIKLSDVNDNKPIFKESLYRLTVSESAPTGTSIGTIMAYDNDIGENAEMDYSIEEDDSQTFDIITNHETQEGIVILKKKVDFEHQNHYGIRAKVKNHHVPEQLMKYHTEASTTFIKIQVEDVDEPPLFLLPYYVFEVFEETPQGSFVGVVSATDPDNRKSPIRYSITRSKVFNINDNGTITTSNSLDREISAWYNLSITATEKYNIEQISSIPLYVQVLNINDHAPEFSQYYETYVCENAGSGQVIQTISAVDRDESIEEHHFYFNLSVEDTNNSSFTIIDNQDNTAVILTNRTGFNLQEEPVFYISILIADNGIPSLTSTNTLTIHVCDCGDSGSTQTCQYQELVLSMGFKTEVIIAILICIMIIFGFIFLTLGLKQRRKQ

SEQ ID NO: 951 - DNA, 1872 bp, human
atgaactgttatttactgctgcgttttatgttgggaattcctctcctatggccttgtcttggagcaacagaaaactctcaaacaaagaaagtcaagcagccagtgcgatctcatttgagagtgaagcgtggctgggtgtggaaccaattttttgtaccagaggaaatgaatacgactagtcatcacatcggccagctaagatctgatttagacaatggaaacaattctttccagtacaagcttttgggagctggagctggaagtacttttatcattgatgaaagaacaggtgacatatatgccatacagaagcttgatagagaggagcgatccctctacatcttaagagcccaggtaatagacatcgctactggaagggctgtggaacctgagtctgagtttgtcatcaaagtttcggatatcaatgacaatgaaccaaaattcctagatgaaccttatgaggccattgtaccagagatgtctccagaaggaacattagttatccaggtgacagcaagtgatgctgacgatccctcaagtggtaataatgctcgtctcctctacagcttacttcaaggccagccatatttttctgttgaaccaacaacaggagtcataagaatatcttctaaaatggatagagaactgcaagatgagtattgggtaatcattcaagccaaggacatgattggtcagccaggagcgttgtctggaacaacaagtgtattaattaaactttcagatgttaatgacaataagcctatatttaaagaaagtttataccgcttgactgtctctgaatctgcacccactgggacttctataggaacaatcatggcatatgataatgacataggagagaatgcagaaatggattacagcattgaagaggatgattcgcaaacatttgacattattactaatcatgaaactcaagaaggaatagttatattaaaaaagaaagtggattttgagcaccagaaccactacggtattagagcaaaagttaaaaaccatcatgttcctgagcagctcatgaagtaccacactgaggcttccaccactttcattaagatccaggtggaagatgttgatgagcctcctcttttcctccttccatattatgtatttgaagtttttgaagaaaccccacagggatcatttgtaggcgtggtgtctgccacagacccagacaataggaaatctcctatcaggtattctattactaggagcaaagtgttcaatatcaatgataatggtacaatcactacaagtaactcactggatcgtgaaatcagtgcttggtacaacctaagtattacagccacagaaaaatacaatatagaacagatctcttcgatcccactgtatgtgcaagttcttaacatcaatgatcatgctcctgagttctctcaatactatgagacttatgtttgtgaaaatgcaggctctggtcaggtaattcagactatcagtgcagtggatagagatgaatccatagaagagcaccatttttactttaatctatctgtagaagacactaacaattcaagttttacaatcatagataatcaagataacacagctgtcattttgactaatagaactggttttaaccttcaagaagaacctgtcttctacatctccatcttaattgccgacaatggaatcccgtcacttacaagtacaaacacccttaccatccatgtctgtgactgtggtgacagtgggagcacacagacctgccagtaccaggagcttgtgctttccatgggattcaagacagaagtcatcattgctattctcatttgcattatgatcatatttgggtttatttttttgactttgggtttaaaacaacggagaaaacag

SEQ ID NO: 952 - protein, 729 aa, artificial
  huCDH19 (44-141) muCDH19 (140-770)
GWVWNQFFVPEEMNTTSHHIGQLRSDLDNGNNSFQYKLLGAGAGSTFIIDERTGDIYAIQKLDREERSLYILRAQVIDIATGRAVEPESEFVIKVSDINDNEPRFLDEPYEAIVPEMSPEGTFVIKVTANDADDPSTGYHARILYNLERGQPYFSVEPTTGVIRISSKMDRELQDTYCVIIQAKDMLGQPGALSGTTTVSIKLSDINDNKPIFKESFYRFTISESAPIGTSIGKIMAYDDDIGENAEMEYSIEDDDSKIFDIIIDNDTQEGIVILKKKVDFEQQSYYGIRAKVKNCHVDEELAPAHVNASTTYIKVQVEDEDEPPVFLLPYYILEIPEGKPYGTIVGTVSATDPDRRQSPMRYYLTGSKMFDINDNGTIITTNMLDREVSAWYNLTVTATETYNVQQISSAHVYVQVFNINDNAPEFSQFYETYVCENAESGEIVQIISAIDRDESIEDHHFYFNHSLEDTNNSSFMLTDNQDNTAVILSNRTGFNLKEEPVFYMIILIADNGIPSLTSTNTLTIQVCDCGDSRNTETCANKGLLFIMGFRTEAIIAIMICVMVIFGFFFLILALKQRRKETLFPEKTEDFRENIFCYDDEGGGEEDSEAFDIVELRQSTVMRERKPQRSKSAEIRSLYRQSLQVGPDSAIFRKFILEKLEEANTDPCAPPFDSLQTFAYEGTGSSAGSLSSLASRDTDQEDDFDYLNDLGPRFKRLASMFGSAVQPNN

SEQ ID NO: 953 - DNA, 2190 bp, artificial
  huCDH19 (44-141) muCDH19 (140-770)
ggctgggtgtggaaccaattttttgtaccagaggaaatgaatacgactagtcatcacatcggccagctaagatctgatttagacaatggaaacaattctttccagtacaagcttttgggagctggagctggaagtacttttatcattgatgaaagaacaggtgacatatatgccatacagaagcttgatagagaggagcgatccctctacatcttaagagcccaggtaatagacatcgctactggaagggctgtggaacctgagtctgagtttgtcatcaaagtttcggatatcaatgacaatgaacccagattcctagatgaaccatatgaggccattgtacctgagatgtctccagaaggaacatttgtcatcaaggtgacagccaatgacgcagatgatccttcaactggctatcatgctcgcatcctatacaacttagaacgaggtcaaccatacttttctgttgagccaacaacaggagtcataaggatatcttctaagatggatagagagttgcaagatacatactgtgtaattattcaagccaaggacatgctcggtcagcctggagccttgtctggaacaacaaccgtatcaattaagctgtcagatattaatgacaacaagccaatattcaaagaaagtttctaccgcttcactatatctgaatctgcacccattggaacatcaatagggaaaattatggcatatgatgatgacataggggagaatgcagagatggagtacagcattgaagatgatgattcaaaaatatttgacataatcattgacaatgacacccaagaagggatagttatacttaaaaagaaagttgattttgagcagcagagctattatggcattagagctaaggttaaaaactgccatgtggatgaagagcttgcacctgcccatgttaacgcttccacaacctacattaaagttcaagtagaagatgaagatgaacctcctgttttcctcttaccatattacatacttgaaattcctgaaggaaaaccatatggaacaattgtggggacggtttctgccacagacccagatcgaagacaatctcctatgagatattatctcactggaagcaaaatgtttgatatcaatgacaatggaacaataatcaccactaacatgcttgacagagaggtcagtgcttggtacaacttgactgtcacagctactgaaacatacaatgtacaacagatctcttcagcccatgtttatgtacaagtctttaacattaacgacaatgctccagagttctctcaattctatgagacttatgtttgtgaaaatgctgaatctggtgagatagttcagatcatcagtgcaattgatagagatgagtccatagaagatcaccatttttactttaatcactctctggaagacacaaacaactcaagttttatgctaacagacaatcaagataacacagctgtaattctgagtaatagaactggtttcaatcttaaagaagagcctgtcttctacatgatcatcttgattgctgataacgggatcccatctctcacaagcacaaacactctcactatccaagtctgtgactgtggagacagtagaaacacagaaacttgtgctaacaagggacttctctttatcatgggattcagaacagaggcaataattgccatcatgatatgtgttatggtaatatttgggtttttctttttgattcttgctctgaaacagcgaagaaaggagactctatttccagagaagactgaagactttagggagaatatattttgctatgatgatgaaggcggcggggaagaagactcggaagcctttgacatcgtagagctgagacaaagtacagtaatgagagaaagaaagcctcagagaagcaagagtgcggagatcaggagcttgtacaggcagtccctgcaggtgggcccagacagtgccatatttcgaaaatttatcctagagaagcttgaagaagccaacacagacccatgtgctcccccctttgattcactacagacgtttgcctatgagggaacagggtcatcagctggctctctgagctccttggcatccagagacactgatcaggaggatgacttcgactaccttaatgacctgggacctcgttttaaaagattagcaagcatgtttggctctgcagtacaacccaacaattag

SEQ ID NO: 954 - protein, 729 aa, artificial
  huCDH19 (44-249) muCDH19 (248-770)
GWVWNQFFVPEEMNTTSHHIGQLRSDLDNGNNSFQYKLLGAGAGSTFIIDERTGDIYAIQKLDREERSLYILRAQVIDIATGRAVEPESEFVIKVSDINDNEPKFLDEPYEAIVPEMSPEGTLVIQVTASDADDPSSGNNARLLYSLLQGQPYFSVEPTTGVIRISSKMDRELQDEYWVIIQAKDMIGQPGALSGTTSVLIKLSDVNDNKPIFKESFYRFTISESAPIGTSIGKIMAYDDDIGENAEMEYSIEDDDSKIFDIIIDNDTQEGIVILKKKVDFEQQSYYGIRAKVKNCHVDEELAPAHVNASTTYIKVQVEDEDEPPVFLLPYYILEIPEGKPYGTIVGTVSATDPDRRQSPMRYYLTGSKMFDINDNGTIITTNMLDREVSAWYNLTVTATETYNVQQISSAHVYVQVFNINDNAPEFSQFYETYVCENAESGEIVQIISAIDRDESIEDHHFYFNHSLEDTNNSSFMLTDNQDNTAVILSNRTGFNLKEEPVFYMIILIADNGIPSLTSTNTLTIQVCDCGDSRNTETCANKGLLFIMGFRTEAIIAIMICVMVIFGFFFLILALKQRRKETLFPEKTEDFRENIFCYDDEGGGEEDSEAFDIVELRQSTVMRERKPQRSKSAEIRSLYRQSLQVGPDSAIFRKFILEKLEEANTDPCAPPFDSLQTFAYEGTGSSAGSLSSLASRDTDQEDDFDYLNDLGPRFKRLASMFGSAVQPNN

SEQ ID NO: 955 - DNA, 2190 bp, artificial
  huCDH19 (44-249) muCDH19 (248-770)
ggctgggtgtggaaccaattttttgtaccagaggaaatgaatacgactagtcatcacatcggccagctaagatctgatttagacaatggaaacaattctttccagtacaagcttttgggagctggagctggaagtacttttatcattgatgaaagaacaggtgacatatatgccatacagaagcttgatagagaggagcgatccctctacatcttaagagcccaggtaatagacatcgctactggaagggctgtggaacctgagtctgagtttgtcatcaaagtttcggatatcaatgacaatgaaccaaaattcctagatgaaccttatgaggccattgtaccagagatgtctccagaaggaacattagttatccaggtgacagcaagtgatgctgacgatccctcaagtggtaataatgctcgtctcctctacagcttacttcaaggccagccatatttttctgttgaaccaacaacaggagtcataagaatatcttctaaaatggatagagaactgcaagatgagtattgggtaatcattcaagccaaggacatgattggtcagccaggagcgttgtctggaacaacaagtgtattaattaaactttcagatgttaatgacaacaagccaatattcaaagaaagtttctaccgcttcactatatctgaatctgcacccattggaacatcaatagggaaaattatggcatatgatgatgacataggggagaatgcagagatggagtacagcattgaagatgatgattcaaaaatatttgacataatcattgacaatgacacccaagaagggatagttatacttaaaaagaaagttgattttgagcagcagagctattatggcattagagctaaggttaaaaactgccatgtggatgaagagcttgcacctgcccatgttaacgcttccacaacctacattaaagttcaagtagaagatgaagatgaacctcctgttttcctcttaccatattacatacttgaaattcctgaaggaaaaccatatggaacaattgtggggacggtttctgccacagacccagatcgaagacaatctcctatgagatattatctcactggaagcaaaatgtttgatatcaatgacaatggaacaataatcaccactaacatgcttgacagagaggtcagtgcttggtacaacttgactgtcacagctactgaaacatacaatgtacaacagatctcttcagcccatgtttatgtacaagtctttaacattaacgacaatgctccagagttctctcaattctatgagacttatgtttgtgaaaatgctgaatctggtgagatagttcagatcatcagtgcaattgatagagatgagtccatagaagatcaccatttttactttaatcactctctggaagacacaaacaactcaagttttatgctaacagacaatcaagataacacagctgtaattctgagtaatagaactggtttcaatcttaaagaagagcctgtcttctacatgatcatcttgattgctgataacgggatcccatctctcacaagcacaaacactctcactatccaagtctgtgactgtggagacagtagaaacacagaaacttgtgctaacaagggacttctctttatcatgggattcagaacagaggcaataattgccatcatgatatgtgttatggtaatatttgggtttttctttttgattcttgctctgaaacagcgaagaaaggagactctatttccagagaagactgaagactttagggagaatatattttgctatgatgatgaaggcggcggggaagaagactcggaagcctttgacatcgtagagctgagacaaagtacagtaatgagagaaagaaagcctcagagaagcaagagtgcggagatcaggagcttgtacaggcagtccctgcaggtgggcccagacagtgccatatttcgaaaatttatcctagagaagcttgaagaagccaacacagacccatgtgctcccccctttgattcactacagacgtttgcctatgagggaacagggtcatcagctggctctctgagctccttggcatccagagacactgatcaggaggatgacttcgactaccttaatgacctgggacctcgttttaaaagattagcaagcatgtttggctctgcagtacaacccaacaattag

SEQ ID NO: 956 - protein, 727 aa, artificial
  muCDH19 (44-139) huCDH19 (142-249) muCDH19 (248-770)
AWVWRPFVVLEEMDDIQCVGKLRSDLDNGNNSFQYKLLGIGAGSFSINERTGEICAIQKLDREEKSLYILRAQVIDTTIGKAVETESEFVIRVLDINDNEPKFLDEPYEAIVPEMSPEGTLVIQVTASDADDPSSGNNARLLYSLLQGQPYFSVEPTTGVIRISSKMDRELQDEYWVIIQAKDMIGQPGALSGTTSVLIKLSDVNDNKPIFKESFYRFTISESAPIGTSIGKIMAYDDDIGENAEMEYSIEDDDSKIFDIIIDNDTQEGIVILKKKVDFEQQSYYGIRAKVKNCHVDEELAPAHVNASTTYIKVQVEDEDEPPVFLLPYYILEIPEGKPYGTIVGTVSATDPDRRQSPMRYYLTGSKMFDINDNGTIITTNMLDREVSAWYNLTVTATETYNVQQISSAHVYVQVFNINDNAPEFSQFYETYVCENAESGEIVQIISAIDRDESIEDHHFYFNHSLEDTNNSSFMLTDNQDNTAVILSNRTGFNLKEEPVFYMIILIADNGIPSLTSTNTLTIQVCDCGDSRNTETCANKGLLFIMGFRTEAIIAIMICVMVIFGFFFLILALKQRRKETLFPEKTEDFRENIFCYDDEGGGEEDSEAFDIVELRQSTVMRERKPQRSKSAEIRSLYRQSLQVGPDSAIFRKFILEKLEEANTDPCAPPFDSLQTFAYEGTGSSAGSLSSLASRDTDQEDDFDYLNDLGPRFKRLASMFGSAVQPNN

SEQ ID NO: 957 - DNA, 2184 bp, artificial
  muCDH19 (44-139) huCDH19 (142-249) muCDH19 (248-770)
gcctgggtgtggagaccatttgttgttctagaagaaatggatgatatacaatgtgttggaaagctaagatctgacttagacaatggaaacaactctttccagtacaagctactggggattggcgctggaagctttagcattaatgaaagaacaggtgaaatatgtgccatacagaagcttgatagagaggaaaaatccctctacattctgagagcccaggtaatagacaccactattgggaaggctgtggaaactgaatccgagtttgtcatcagagttttggatatcaatgacaatgaaccaaaattcctagatgaaccttatgaggccattgtaccagagatgtctccagaaggaacattagttatccaggtgacagcaagtgatgctgacgatccctcaagtggtaataatgctcgtctcctctacagcttacttcaaggccagccatatttttctgttgaaccaacaacaggagtcataagaatatcttctaaaatggatagagaactgcaagatgagtattgggtaatcattcaagccaaggacatgattggtcagccaggagcgttgtctggaacaacaagtgtattaattaaactttcagatgttaatgacaacaagccaatattcaaagaaagtttctaccgcttcactatatctgaatctgcacccattggaacatcaatagggaaaattatggcatatgatgatgacataggggagaatgcagagatggagtacagcattgaagatgatgattcaaaaatatttgacataatcattgacaatgacacccaagaagggatagttatacttaaaaagaaagttgattttgagcagcagagctattatggcattagagctaaggttaaaaactgccatgtggatgaagagcttgcacctgcccatgttaacgcttccacaacctacattaaagttcaagtagaagatgaagatgaacctcctgttttcctcttaccatattacatacttgaaattcctgaaggaaaaccatatggaacaattgtggggacggtttctgccacagacccagatcgaagacaatctcctatgagatattatctcactggaagcaaaatgtttgatatcaatgacaatggaacaataatcaccactaacatgcttgacagagaggtcagtgcttggtacaacttgactgtcacagctactgaaacatacaatgtacaacagatctcttcagcccatgtttatgtacaagtctttaacattaacgacaatgctccagagttctctcaattctatgagacttatgtttgtgaaaatgctgaatctggtgagatagttcagatcatcagtgcaattgatagagatgagtccatagaagatcaccatttttactttaatcactctctggaagacacaaacaactcaagttttatgctaacagacaatcaagataacacagctgtaattctgagtaatagaactggtttcaatcttaaagaagagcctgtcttctacatgatcatcttgattgctgataacgggatcccatctctcacaagcacaaacactctcactatccaagtctgtgactgtggagacagtagaaacacagaaacttgtgctaacaagggacttctctttatcatgggattcagaacagaggcaataattgccatcatgatatgtgttatggtaatatttgggtttttctttttgattcttgctctgaaacagcgaagaaaggagactctatttccagagaagactgaagactttagggagaatatattttgctatgatgatgaaggcggcggggaagaagactcggaagcctttgacatcgtagagctgagacaaagtacagtaatgagagaaagaaagcctcagagaagcaagagtgcggagatcaggagcttgtacaggcagtccctgcaggtgggcccagacagtgccatatttcgaaaatttatcctagagaagcttgaagaagccaacacagacccatgtgctcccccctttgattcactacagacgtttgcctatgagggaacagggtcatcagctggctctctgagctccttggcatccagagacactgatcaggaggatgacttcgactaccttaatgacctgggacctcgttttaaaagattagcaagcatgtttggctctgcagtacaacccaacaattag

SEQ ID NO: 958 - protein, 727 aa, artificial
  muCDH19 (44-139) huCDH19 (142-364) muCDH19 (363-770)
AWVWRPFVVLEEMDDIQCVGKLRSDLDNGNNSFQYKLLGIGAGSFSINERTGEICAIQKLDREEKSLYILRAQVIDTTIGKAVETESEFVIRVLDINDNEPKFLDEPYEAIVPEMSPEGTLVIQVTASDADDPSSGNNARLLYSLLQGQPYFSVEPTTGVIRISSKMDRELQDEYWVIIQAKDMIGQPGALSGTTSVLIKLSDVNDNKPIFKESLYRLTVSESAPTGTSIGTIMAYDNDIGENAEMDYSIEEDDSQTFDIITNHETQEGIVILKKKVDFEHQNHYGIRAKVKNHHVPEQLMKYHTEASTTFIKIQVEDVDEPPVFLLPYYILEIPEGKPYGTIVGTVSATDPDRRQSPMRYYLTGSKMFDINDNGTIITTNMLDREVSAWYNLTVTATETYNVQQISSAHVYVQVFNINDNAPEFSQFYETYVCENAESGEIVQIISAIDRDESIEDHHFYFNHSLEDTNNSSFMLTDNQDNTAVILSNRTGFNLKEEPVFYMIILIADNGIPSLTSTNTLTIQVCDCGDSRNTETCANKGLLFIMGFRTEAIIAIMICVMVIFGFFFLILALKQRRKETLFPEKTEDFRENIFCYDDEGGGEEDSEAFDIVELRQSTVMRERKPQRSKSAEIRSLYRQSLQVGPDSAIFRKFILEKLEEANTDPCAPPFDSLQTFAYEGTGSSAGSLSSLASRDTDQEDDFDYLNDLGPRFKRLASMFGSAVQPNN

SEQ ID NO: 959 - DNA, 2184 bp, artificial
  C137847 muCDH19 (44-139) huCDH19 (142-364) muCDH19 (363-770)
gcctgggtgtggagaccatttgttgttctagaagaaatggatgatatacaatgtgttggaaagctaagatctgacttagacaatggaaacaactctttccagtacaagctactggggattggcgctggaagctttagcattaatgaaagaacaggtgaaatatgtgccatacagaagcttgatagagaggaaaaatccctctacattctgagagcccaggtaatagacaccactattgggaaggctgtggaaactgaatccgagtttgtcatcagagttttggatatcaatgacaatgaaccaaaattcctagatgaaccttatgaggccattgtaccagagatgtctccagaaggaacattagttatccaggtgacagcaagtgatgctgacgatccctcaagtggtaataatgctcgtctcctctacagcttacttcaaggccagccatatttttctgttgaaccaacaacaggagtcataagaatatcttctaaaatggatagagaactgcaagatgagtattgggtaatcattcaagccaaggacatgattggtcagccaggagcgttgtctggaacaacaagtgtattaattaaactttcagatgttaatgacaataagcctatatttaaagaaagtttataccgcttgactgtctctgaatctgcacccactgggacttctataggaacaatcatggcatatgataatgacataggagagaatgcagaaatggattacagcattgaagaggatgattcgcaaacatttgacattattactaatcatgaaactcaagaaggaatagttatattaaaaaagaaagtggattttgagcaccagaaccactacggtattagagcaaaagttaaaaaccatcatgttcctgagcagctcatgaagtaccacactgaggcttccaccactttcattaagatccaggtggaagatgttgatgaacctcctgttttcctcttaccatattacatacttgaaattcctgaaggaaaaccatatggaacaattgtggggacggtttctgccacagacccagatcgaagacaatctcctatgagatattatctcactggaagcaaaatgtttgatatcaatgacaatggaacaataatcaccactaacatgcttgacagagaggtcagtgcttggtacaacttgactgtcacagctactgaaacatacaatgtacaacagatctcttcagcccatgtttatgtacaagtctttaacattaacgacaatgctccagagttctctcaattctatgagacttatgtttgtgaaaatgctgaatctggtgagatagttcagatcatcagtgcaattgatagagatgagtccatagaagatcaccatttttactttaatcactctctggaagacacaaacaactcaagttttatgctaacagacaatcaagataacacagctgtaattctgagtaatagaactggtttcaatcttaaagaagagcctgtcttctacatgatcatcttgattgctgataacgggatcccatctctcacaagcacaaacactctcactatccaagtctgtgactgtggagacagtagaaacacagaaacttgtgctaacaagggacttctctttatcatgggattcagaacagaggcaataattgccatcatgatatgtgttatggtaatatttgggtttttctttttgattcttgctctgaaacagcgaagaaaggagactctatttccagagaagactgaagactttagggagaatatattttgctatgatgatgaaggcggcggggaagaagactcggaagcctttgacatcgtagagctgagacaaagtacagtaatgagagaaagaaagcctcagagaagcaagagtgcggagatcaggagcttgtacaggcagtccctgcaggtgggcccagacagtgccatatttcgaaaatttatcctagagaagcttgaagaagccaacacagacccatgtgctcccccctttgattcactacagacgtttgcctatgagggaacagggtcatcagctggctctctgagctccttggcatccagagacactgatcaggaggatgacttcgactaccttaatgacctgggacctcgttttaaaagattagcaagcatgtttggctctgcagtacaacccaacaattag

SEQ ID NO: 960 - protein, 727 aa, artificial
  C137911 muCDH19 (44-247) huCDH19 (250-364) muCDH19 (363-770)
AWVWRPFVVLEEMDDIQCVGKLRSDLDNGNNSFQYKLLGIGAGSFSINERTGEICAIQKLDREEKSLYILRAQVIDTTIGKAVETESEFVIRVLDINDNEPRFLDEPYEAIVPEMSPEGTFVIKVTANDADDPSTGYHARILYNLERGQPYFSVEPTTGVIRISSKMDRELQDTYCVIIQAKDMLGQPGALSGTTTVSIKLSDINDNKPIFKESLYRLTVSESAPTGTSIGTIMAYDNDIGENAEMDYSIEEDDSQTFDIITNHETQEGIVILKKKVDFEHQNHYGIRAKVKNHHVPEQLMKYHTEASTTFIKIQVEDVDEPPVFLLPYYILEIPEGKPYGTIVGTVSATDPDRRQSPMRYYLTGSKMFDINDNGTIITTNMLDREVSAWYNLTVTATETYNVQQISSAHVYVQVFNINDNAPEFSQFYETYVCENAESGEIVQIISAIDRDESIEDHHFYFNHSLEDTNNSSFMLTDNQDNTAVILSNRTGFNLKEEPVFYMIILIADNGIPSLTSTNTLTIQVCDCGDSRNTETCANKGLLFIMGFRTEAIIAIMICVMVIFGFFFLILALKQRRKETLFPEKTEDFRENIFCYDDEGGGEEDSEAFDIVELRQSTVMRERKPQRSKSAEIRSLYRQSLQVGPDSAIFRKFILEKLEEANTDPCAPPFDSLQTFAYEGTGSSAGSLSSLASRDTDQEDDFDYLNDLGPRFKRLASMFGSAVQPNN

SEQ ID NO: 961 - DNA, 2184 bp, artificial
  C137911 muCDH19 (44-247) huCDH19 (250-364) muCDH19 (363-770)
gcctgggtgtggagaccatttgttgttctagaagaaatggatgatatacaatgtgttggaaagctaagatctgacttagacaatggaaacaactctttccagtacaagctactggggattggcgctggaagctttagcattaatgaaagaacaggtgaaatatgtgccatacagaagcttgatagagaggaaaaatccctctacattctgagagcccaggtaatagacaccactattgggaaggctgtggaaactgaatccgagtttgtcatcagagttttggatatcaatgacaatgaacccagattcctagatgaaccatatgaggccattgtacctgagatgtctccagaaggaacatttgtcatcaaggtgacagccaatgacgcagatgatccttcaactggctatcatgctcgcatcctatacaacttagaacgaggtcaaccatacttttctgttgagccaacaacaggagtcataaggatatcttctaagatggatagagagttgcaagatacatactgtgtaattattcaagccaaggacatgctcggtcagcctggagccttgtctggaacaacaaccgtatcaattaagctgtcagatattaatgacaataagcctatatttaaagaaagtttataccgcttgactgtctctgaatctgcacccactgggacttctataggaacaatcatggcatatgataatgacataggagagaatgcagaaatggattacagcattgaagaggatgattcgcaaacatttgacattattactaatcatgaaactcaagaaggaatagttatattaaaaaagaaagtggattttgagcaccagaaccactacggtattagagcaaaagttaaaaaccatcatgttcctgagcagctcatgaagtaccacactgaggcttccaccactttcattaagatccaggtggaagatgttgatgaacctcctgttttcctcttaccatattacatacttgaaattcctgaaggaaaaccatatggaacaattgtggggacggtttctgccacagacccagatcgaagacaatctcctatgagatattatctcactggaagcaaaatgtttgatatcaatgacaatggaacaataatcaccactaacatgcttgacagagaggtcagtgcttggtacaacttgactgtcacagctactgaaacatacaatgtacaacagatctcttcagcccatgtttatgtacaagtctttaacattaacgacaatgctccagagttctctcaattctatgagacttatgtttgtgaaaatgctgaatctggtgagatagttcagatcatcagtgcaattgatagagatgagtccatagaagatcaccatttttactttaatcactctctggaagacacaaacaactcaagttttatgctaacagacaatcaagataacacagctgtaattctgagtaatagaactggtttcaatcttaaagaagagcctgtcttctacatgatcatcttgattgctgataacgggatcccatctctcacaagcacaaacactctcactatccaagtctgtgactgtggagacagtagaaacacagaaacttgtgctaacaagggacttctctttatcatgggattcagaacagaggcaataattgccatcatgatatgtgttatggtaatatttgggtttttctttttgattcttgctctgaaacagcgaagaaaggagactctatttccagagaagactgaagactttagggagaatatattttgctatgatgatgaaggcggcggggaagaagactcggaagcctttgacatcgtagagctgagacaaagtacagtaatgagagaaagaaagcctcagagaagcaagagtgcggagatcaggagcttgtacaggcagtccctgcaggtgggcccagacagtgccatatttcgaaaatttatcctagagaagcttgaagaagccaacacagacccatgtgctcccccctttgattcactacagacgtttgcctatgagggaacagggtcatcagctggctctctgagctccttggcatccagagacactgatcaggaggatgacttcgactaccttaatgacctgggacctcgttttaaaagattagcaagcatgtttggctctgcagtacaacccaacaattag

SEQ ID NO: 962 - protein, 727 aa, artificial
  C137917 muCDH19 (44-362) huCDH19 (365-772)
AWVWRPFVVLEEMDDIQCVGKLRSDLDNGNNSFQYKLLGIGAGSFSINERTGEICAIQKLDREEKSLYILRAQVIDTTIGKAVETESEFVIRVLDINDNEPRFLDEPYEAIVPEMSPEGTFVIKVTANDADDPSTGYHARILYNLERGQPYFSVEPTTGVIRISSKMDRELQDTYCVIIQAKDMLGQPGALSGTTTVSIKLSDINDNKPIFKESFYRFTISESAPIGTSIGKIMAYDDDIGENAEMEYSIEDDDSKIFDIIIDNDTQEGIVILKKKVDFEQQSYYGIRAKVKNCHVDEELAPAHVNASTTYIKVQVEDEDEPPLFLLPYYVFEVFEETPQGSFVGVVSATDPDNRKSPIRYSITRSKVFNINDNGTITTSNSLDREISAWYNLSITATEKYNIEQISSIPLYVQVLNINDHAPEFSQYYETYVCENAGSGQVIQTISAVDRDESIEEHHFYFNLSVEDTNNSSFTIIDNQDNTAVILTNRTGFNLQEEPVFYISILIADNGIPSLTSTNTLTIHVCDCGDSGSTQTCQYQELVLSMGFKTEVIIAILICIMIIFGFIFLTLGLKQRRKQILFPEKSEDFRENIFQYDDEGGGEEDTEAFDIAELRSSTIMRERKTRKTTSAEIRSLYRQSLQVGPDSAIFRKFILEKLEEANTDPCAPPFDSLQTYAFEGTGSLAGSLSSLESAVSDQDESYDYLNELGPRFKRLACMFGSAVQSNN

SEQ ID NO: 963 - protein, 2184 aa, artificial
  C137917 muCDH19 (44-362) huCDH19 (365-772)
GCCTGGGTGTGGAGACCATTTGTTGTTCTAGAAGAAATGGATGATATACAATGTGTTGGAAAGCTAAGATCTGACTTAGACAATGGAAACAACTCTTTCCAGTACAAGCTACTGGGGATTGGCGCTGGAAGCTTTAGCATTAATGAAAGAACAGGTGAAATATGTGCCATACAGAAGCTTGATAGAGAGGAAAAATCCCTCTACATTCTGAGAGCCCAGGTAATAGACACCACTATTGGGAAGGCTGTGGAAACTGAATCCGAGTTTGTCATCAGAGTTTTGGATATCAATGACAATGAACCCAGATTCCTAGATGAACCATATGAGGCCATTGTACCTGAGATGTCTCCAGAAGGAACATTTGTCATCAAGGTGACAGCCAATGACGCAGATGATCCTTCAACTGGCTATCATGCTCGCATCCTATACAACTTAGAACGAGGTCAACCATACTTTTCTGTTGAGCCAACAACAGGAGTCATAAGGATATCTTCTAAGATGGATAGAGAGTTGCAAGATACATACTGTGTAATTATTCAAGCCAAGGACATGCTCGGTCAGCCTGGAGCCTTGTCTGGAACAACAACCGTATCAATTAAGCTGTCAGATATTAATGACAACAAGCCAATATTCAAAGAAAGTTTCTACCGCTTCACTATATCTGAATCTGCACCCATTGGAACATCAATAGGGAAAATTATGGCATATGATGATGACATAGGGGAGAATGCAGAGATGGAGTACAGCATTGAAGATGATGATTCAAAAATATTTGACATAATCATTGACAATGACACCCAAGAAGGGATAGTTATACTTAAAAAGAAAGTTGATTTTGAGCAGCAGAGCTATTATGGCATTAGAGCTAAGGTTAAAAACTGCCATGTGGATGAAGAGCTTGCACCTGCCCATGTTAACGCTTCCACAACCTACATTAAAGTTCAAGTAGAAGATGAAGATGAGCCTCCTCTTTTCCTCCTTCCATATTATGTATTTGAAGTTTTTGAAGAAACCCCACAGGGATCATTTGTAGGCGTGGTGTCTGCCACAGACCCAGACAATAGGAAATCTCCTATCAGGTATTCTATTACTAGGAGCAAAGTGTTCAATATCAATGATAATGGTACAATCACTACAAGTAACTCACTGGATCGTGAAATCAGTGCTTGGTACAACCTAAGTATTACAGCCACAGAAAAATACAATATAGAACAGATCTCTTCGATCCCACTGTATGTGCAAGTTCTTAACATCAATGATCATGCTCCTGAGTTCTCTCAATACTATGAGACTTATGTTTGTGAAAATGCAGGCTCTGGTCAGGTAATTCAGACTATCAGTGCAGTGGATAGAGATGAATCCATAGAAGAGCACCATTTTTACTTTAATCTATCTGTAGAAGACACTAACAATTCAAGTTTTACAATCATAGATAATCAAGATAACACAGCTGTCATTTTGACTAATAGAACTGGTTTTAACCTTCAAGAAGAACCTGTCTTCTACATCTCCATCTTAATTGCCGACAATGGAATCCCGTCACTTACAAGTACAAACACCCTTACCATCCATGTCTGTGACTGTGGTGACAGTGGGAGCACACAGACCTGCCAGTACCAGGAGCTTGTGCTTTCCATGGGATTCAAGACAGAAGTCATCATTGCTATTCTCATTTGCATTATGATCATATTTGGGTTTATTTTTTTGACTTTGGGTTTAAAACAACGGAGAAAACAGATTCTATTTCCTGAGAAAAGTGAAGATTTCAGAGAGAATATATTCCAATATGATGATGAAGGGGGTGGAGAAGAAGATACAGAGGCCTTTGATATAGCAGAGCTGAGGAGTAGTACCATAATGCGGGAACGCAAGACTCGGAAAACCACAAGCGCTGAGATCAGGAGCCTATACAGGCAGTCTTTGCAAGTTGGCCCCGACAGTGCCATATTCAGGAAATTCATTCTGGAAAAGCTCGAAGAAGCTAATACTGATCCGTGTGCCCCTCCTTTTGATTCCCTCCAGACCTACGCTTTTGAGGGAACAGGGTCATTAGCTGGATCCCTGAGCTCCTTAGAATCAGCAGTCTCTGATCAGGATGAAAGCTATGATTACCTTAATGAGTTGGGACCTCGCTTTAAAAGATTAGCATGCATGTTTGGTTCTGCAGTGCAGTCAAATAATTAG

SEQ ID NO: 964 - protein, 727 aa, artificial
  C137915 muCDH19 (44-461) huCDH19 (464-772)
AWVWRPFVVLEEMDDIQCVGKLRSDLDNGNNSFQYKLLGIGAGSFSINERTGEICAIQKLDREEKSLYILRAQVIDTTIGKAVETESEFVIRVLDINDNEPRFLDEPYEAIVPEMSPEGTFVIKVTANDADDPSTGYHARILYNLERGQPYFSVEPTTGVIRISSKMDRELQDTYCVIIQAKDMLGQPGALSGTTTVSIKLSDINDNKPIFKESFYRFTISESAPIGTSIGKIMAYDDDIGENAEMEYSIEDDDSKIFDIIIDNDTQEGIVILKKKVDFEQQSYYGIRAKVKNCHVDEELAPAHVNASTTYIKVQVEDEDEPPVFLLPYYILEIPEGKPYGTIVGTVSATDPDRRQSPMRYYLTGSKMFDINDNGTIITTNMLDREVSAWYNLTVTATETYNVQQISSAHVYVQVFNINDHAPEFSQYYETYVCENAGSGQVIQTISAVDRDESIEEHHFYFNLSVEDTNNSSFTIIDNQDNTAVILTNRTGFNLQEEPVFYISILIADNGIPSLTSTNTLTIHVCDCGDSGSTQTCQYQELVLSMGFKTEVIIAILICIMIIFGFIFLTLGLKQRRKQILFPEKSEDFRENIFQYDDEGGGEEDTEAFDIAELRSSTIMRERKTRKTTSAEIRSLYRQSLQVGPDSAIFRKFILEKLEEANTDPCAPPFDSLQTYAFEGTGSLAGSLSSLESAVSDQDESYDYLNELGPRFKRLACMFGSAVQSNN

SEQ ID NO: 965 - DNA, 2184 bp, artificial
  C137915 muCDH19 (44-461) huCDH19 (464-772)
gcctgggtgtggagaccatttgttgttctagaagaaatggatgatatacaatgtgttggaaagctaagatctgacttagacaatggaaacaactctttccagtacaagctactggggattggcgctggaagctttagcattaatgaaagaacaggtgaaatatgtgccatacagaagcttgatagagaggaaaaatccctctacattctgagagcccaggtaatagacaccactattgggaaggctgtggaaactgaatccgagtttgtcatcagagttttggatatcaatgacaatgaacccagattcctagatgaaccatatgaggccattgtacctgagatgtctccagaaggaacatttgtcatcaaggtgacagccaatgacgcagatgatccttcaactggctatcatgctcgcatcctatacaacttagaacgaggtcaaccatacttttctgttgagccaacaacaggagtcataaggatatcttctaagatggatagagagttgcaagatacatactgtgtaattattcaagccaaggacatgctcggtcagcctggagccttgtctggaacaacaaccgtatcaattaagctgtcagatattaatgacaacaagccaatattcaaagaaagtttctaccgcttcactatatctgaatctgcacccattggaacatcaatagggaaaattatggcatatgatgatgacataggggagaatgcagagatggagtacagcattgaagatgatgattcaaaaatatttgacataatcattgacaatgacacccaagaagggatagttatacttaaaaagaaagttgattttgagcagcagagctattatggcattagagctaaggttaaaaactgccatgtggatgaagagcttgcacctgcccatgttaacgcttccacaacctacattaaagttcaagtagaagatgaagatgaacctcctgttttcctcttaccatattacatacttgaaattcctgaaggaaaaccatatggaacaattgtggggacggtttctgccacagacccagatcgaagacaatctcctatgagatattatctcactggaagcaaaatgtttgatatcaatgacaatggaacaataatcaccactaacatgcttgacagagaggtcagtgcttggtacaacttgactgtcacagctactgaaacatacaatgtacaacagatctcttcagcccatgtttatgtacaagtctttaacattaatgatcatgctcctgagttctctcaatactatgagacttatgtttgtgaaaatgcaggctctggtcaggtaattcagactatcagtgcagtggatagagatgaatccatagaagagcaccatttttactttaatctatctgtagaagacactaacaattcaagttttacaatcatagataatcaagataacacagctgtcattttgactaatagaactggttttaaccttcaagaagaacctgtcttctacatctccatcttaattgccgacaatggaatcccgtcacttacaagtacaaacacccttaccatccatgtctgtgactgtggtgacagtgggagcacacagacctgccagtaccaggagcttgtgctttccatgggattcaagacagaagtcatcattgctattctcatttgcattatgatcatatttgggtttatttttttgactttgggtttaaaacaacggagaaaacagattctatttcctgagaaaagtgaagatttcagagagaatatattccaatatgatgatgaagggggtggagaagaagatacagaggcctttgatatagcagagctgaggagtagtaccataatgcgggaacgcaagactcggaaaaccacaagcgctgagatcaggagcctatacaggcagtctttgcaagttggccccgacagtgccatattcaggaaattcattctggaaaagctcgaagaagctaatactgatccgtgtgcccctccttttgattccctccagacctacgcttttgagggaacagggtcattagctggatccctgagctccttagaatcagcagtctctgatcaggatgaaagctatgattaccttaatgagttgggacctcgctttaaaagattagcatgcatgtttggttctgcagtgcagtcaaataattag

SEQ ID NO: 966 - protein, 727 aa, artificial
  C71144 muCDH19 (44-770)
AWVWRPFVVLEEMDDIQCVGKLRSDLDNGNNSFQYKLLGIGAGSFSINERTGEICAIQKLDREEKSLYILRAQVIDTTIGKAVETESEFVIRVLDINDNEPRFLDEPYEAIVPEMSPEGTFVIKVTANDADDPSTGYHARILYNLERGQPYFSVEPTTGVIRISSKMDRELQDTYCVIIQAKDMLGQPGALSGTTTVSIKLSDINDNKPIFKESFYRFTISESAPIGTSIGKIMAYDDDIGENAEMEYSIEDDDSKIFDIIIDNDTQEGIVILKKKVDFEQQSYYGIRAKVKNCHVDEELAPAHVNASTTYIKVQVEDEDEPPVFLLPYYILEIPEGKPYGTIVGTVSATDPDRRQSPMRYYLTGSKMFDINDNGTIITTNMLDREVSAWYNLTVTATETYNVQQISSAHVYVQVFNINDNAPEFSQFYETYVCENAESGEIVQIISAIDRDESIEDHHFYFNHSLEDTNNSSFMLTDNQDNTAVILSNRTGFNLKEEPVFYMIILIADNGIPSLTSTNTLTIQVCDCGDSRNTETCANKGLLFIMGFRTEAIIAIMICVMVIFGFFFLILALKQRRKETLFPEKTEDFRENIFCYDDEGGGEEDSEAFDIVELRQSTVMRERKPQRSKSAEIRSLYRQSLQVGPDSAIFRKFILEKLEEANTDPCAPPFDSLQTFAYEGTGSSAGSLSSLASRDTDQEDDFDYLNDLGPRFKRLASMFGSAVQPNN

SEQ ID NO: 967 - protein, 2184 aa, artificial
  C71144 muCDH19 (44-770)
GCCTGGGTGTGGAGACCATTTGTTGTTCTAGAAGAAATGGATGATATACAATGTGTTGGAAAGCTAAGATCTGACTTAGACAATGGAAACAACTCTTTCCAGTACAAGCTACTGGGGATTGGCGCTGGAAGCTTTAGCATTAATGAAAGAACAGGTGAAATATGTGCCATACAGAAGCTTGATAGAGAGGAAAAATCCCTCTACATTCTGAGAGCCCAGGTAATAGACACCACTATTGGGAAGGCTGTGGAAACTGAATCCGAGTTTGTCATCAGAGTTTTGGATATCAATGACAATGAACCCAGATTCCTAGATGAACCATATGAGGCCATTGTACCTGAGATGTCTCCAGAAGGAACATTTGTCATCAAGGTGACAGCCAATGACGCAGATGATCCTTCAACTGGCTATCATGCTCGCATCCTATACAACTTAGAACGAGGTCAACCATACTTTTCTGTTGAGCCAACAACAGGAGTCATAAGGATATCTTCTAAGATGGATAGAGAGTTGCAAGATACATACTGTGTAATTATTCAAGCCAAGGACATGCTCGGTCAGCCTGGAGCCTTGTCTGGAACAACAACCGTATCAATTAAGCTGTCAGATATTAATGACAACAAGCCAATATTCAAAGAAAGTTTCTACCGCTTCACTATATCTGAATCTGCACCCATTGGAACATCAATAGGGAAAATTATGGCATATGATGATGACATAGGGGAGAATGCAGAGATGGAGTACAGCATTGAAGATGATGATTCAAAAATATTTGACATAATCATTGACAATGACACCCAAGAAGGGATAGTTATACTTAAAAAGAAAGTTGATTTTGAGCAGCAGAGCTATTATGGCATTAGAGCTAAGGTTAAAAACTGCCATGTGGATGAAGAGCTTGCACCTGCCCATGTTAACGCTTCCACAACCTACATTAAAGTTCAAGTAGAAGATGAAGATGAACCTCCTGTTTTCCTCTTACCATATTACATACTTGAAATTCCTGAAGGAAAACCATATGGAACAATTGTGGGGACGGTTTCTGCCACAGACCCAGATCGAAGACAATCTCCTATGAGATATTATCTCACTGGAAGCAAAATGTTTGATATCAATGACAATGGAACAATAATCACCACTAACATGCTTGACAGAGAGGTCAGTGCTTGGTACAACTTGACTGTCACAGCTACTGAAACATACAATGTACAACAGATCTCTTCAGCCCATGTTTATGTACAAGTCTTTAACATTAACGACAATGCTCCAGAGTTCTCTCAATTCTATGAGACTTATGTTTGTGAAAATGCTGAATCTGGTGAGATAGTTCAGATCATCAGTGCAATTGATAGAGATGAGTCCATAGAAGATCACCATTTTTACTTTAATCACTCTCTGGAAGACACAAACAACTCAAGTTTTATGCTAACAGACAATCAAGATAACACAGCTGTAATTCTGAGTAATAGAACTGGTTTCAATCTTAAAGAAGAGCCTGTCTTCTACATGATCATCTTGATTGCTGATAACGGGATCCCATCTCTCACAAGCACAAACACTCTCACTATCCAAGTCTGTGACTGTGGAGACAGTAGAAACACAGAAACTTGTGCTAACAAGGGACTTCTCTTTATCATGGGATTCAGAACAGAGGCAATAATTGCCATCATGATATGTGTTATGGTAATATTTGGGTTTTTCTTTTTGATTCTTGCTCTGAAACAGCGAAGAAAGGAGACTCTATTTCCAGAGAAGACTGAAGACTTTAGGGAGAATATATTTTGCTATGATGATGAAGGCGGCGGGGAAGAAGACTCGGAAGCCTTTGACATCGTAGAGCTGAGACAAAGTACAGTAATGAGAGAAAGAAAGCCTCAGAGAAGCAAGAGTGCGGAGATCAGGAGCTTGTACAGGCAGTCCCTGCAGGTGGGCCCAGACAGTGCCATATTTCGAAAATTTATCCTAGAGAAGCTTGAAGAAGCCAACACAGACCCATGTGCTCCCCCCTTTGATTCACTACAGACGTTTGCCTATGAGGGAACAGGGTCATCAGCTGGCTCTCTGAGCTCCTTGGCATCCAGAGACACTGATCAGGAGGATGACTTCGACTACCTTAATGACCTGGGACCTCGTTTTAAAAGATTAGCAAGCATGTTTGGCTCTGCAGTACAACCCAACAATTAG

SEQ ID NO: 968 - protein, 8 aa, artificial
  Flag Tag
DYKDDDDK

SEQ ID NO: 969 - DNA, 24 bp, artificial
  Flag Tag
gactacaaagacgatgacgacaag

SEQ ID NO: 970 - protein, 5 aa, artificial
  CDR-H1 of CDH19 2G6
SYGMH

SEQ ID NO: 971 - protein, 17 aa, artificial
  CDR-H2 of CDH19 2G6
FIWYDGSNKYYADSVKD

SEQ ID NO: 972 - protein, 16 aa, artificial
  CDR-H3 of CDH19 2G6
RAGIIGTIGYYYGMDV

SEQ ID NO: 973 - protein, 11 aa, artificial
  CDR-L1 of CDH19 2G6
SGDRLGEKYTC

SEQ ID NO: 974 - protein, 7 aa, artificial
  CDR-L2 of CDH19 2G6
QDTKRPS

SEQ ID NO: 975 - protein, 9 aa, artificial
  CDR-L3 of CDH19 2G6
QAWDSSTVV

SEQ ID NO: 976 - DNA, 375 bp, artificial
  VH of CDH19 2G6
caggtgcagctggtggaatccggcggaggcgtggtgcagcctggccggtccctgagactgtcttgcgccgcctccggcttcaccttctccagctacggcatgcactgggtccgacaggcccctggcaagggcctggaatgggtggccttcatttggtacgacggctccaacaagtactacgccgactccgtgaaggaccggttcaccatctcccgggacaactccaagaacaccctgtacctgcagatgaagtccctgcgggccgaggacaccgccgtgtactactgtgccagaagggccggcatcatcggcaccatcggctactactacggcatggacgtgtggggccagggcaccaccgtgaccgtgtctagc

SEQ ID NO: 977 - protein, 125 aa, artificial; identical to SEQ ID NO: 384
  VH of CDH19 2G6

SEQ ID NO: 978 - DNA, 315 bp, artificial
  VL of CDH19 2G6
tacgagctgacccagcccccctccgtgtccgtgtctcctggccagaccgcctccatcacctgttctggcgaccggctgggcgagaagtacacctgttggtatcagcagcggcctggccagtcccccctgctggtcatctaccaggacaccaagcggccctccggcatccctgagcggttctccggctccaactccggcaacaccgccaccctgaccatctccggcacccaggccatggacgaggccgactactactgccaggcctgggactcctccaccgtggtgttcggcggaggcaccaagctgaccgtgctg

SEQ ID NO: 979 - protein, 106 aa, artificial
  VL of CDH19 2G6
SYELTQPPSVSVSPGQTASITCSGDRLGEKYTCWYQQRPGQSPLLVIYQDTKRPSGIPERFSGSNSGNTATLTISGTQAMDEADYYCQAWDSSTVVFGGGTKLTVL

SEQ ID NO: 980 - DNA, 738 bp, artificial
  VH-VL of CDH19 2G6
caggtgcagctggtggaatccggcggaggcgtggtgcagcctggccggtccctgagactgtcttgcgccgcctccggcttcaccttctccagctacggcatgcactgggtccgacaggcccctggcaagggcctggaatgggtggccttcatttggtacgacggctccaacaagtactacgccgactccgtgaaggaccggttcaccatctcccgggacaactccaagaacaccctgtacctgcagatgaagtccctgcgggccgaggacaccgccgtgtactactgtgccagaagggccggcatcatcggcaccatcggctactactacggcatggacgtgtggggccagggcaccaccgtgaccgtgtctagcggaggcggaggatctggtggcggtggttctggcggcggaggctcctcttacgagctgacccagcccccctccgtgtccgtgtctcctggccagaccgcctccatcacctgttctggcgaccggctgggcgagaagtacacctgttggtatcagcagcggcctggccagtcccccctgctggtcatctaccaggacaccaagcggccctccggcatccctgagcggttctccggctccaactccggcaacaccgccaccctgaccatctccggcacccaggccatggacgaggccgactactactgccaggcctgggactcctccaccgtggtgttcggcggaggcaccaagctgaccgtgctg

SEQ ID NO: 981 - protein, 246 aa, artificial
  VH-VL of CDH19 2G6
QVQLVESGGGVVQPGRSLRLSCAASGFTFSSYGMHWVRQAPGKGLEWVAFIWYDGSNKYYADSVKDRFTISRDNSKNTLYLQMKSLRAEDTAVYYCARRAGIIGTIGYYYGMDVWGQGTTVTVSSGGGGSGGGGSGGGGSSYELTQPPSVSVSPGQTASITCSGDRLGEKYTCWYQQRPGQSPLLVIYQDTKRPSGIPERFSGSNSGNTATLTISGTQAMDEADYYCQAWDSSTVVFGGGTKLTVL

SEQ ID NO: 982 - protein, 507 aa, artificial
  CDH19 2G6 x I2C
QVQLVESGGGVVQPGRSLRLSCAASGFTFSSYGMHWVRQAPGKGLEWVAFIWYDGSNKYYADSVKDRFTISRDNSKNTLYLQMKSLRAEDTAVYYCARRAGIIGTIGYYYGMDVWGQGTTVTVSSGGGGSGGGGSGGGGSSYELTQPPSVSVSPGQTASITCSGDRLGEKYTCWYQQRPGQSPLLVIYQDTKRPSGIPERFSGSNSGNTATLTISGTQAMDEADYYCQAWDSSTVVFGGGTKLTVLSGGGGSEVQLVESGGGLVQPGGSLKLSCAASGFTFNKYAMNWVRQAPGKGLEWVARIRSKYNNYATYYADSVKDRFTISRDDSKNTAYLQMNNLKTEDTAVYYCVRHGNFGNSYISYWAYWGQGTLVTVSSGGGGSGGGGSGGGGSQTVVTQEPSLTVSPGGTVTLTCGSSTGAVTSGNYPNWVQQKPGQAPRGLIGGTKFLAPGTPARFSGSLLGGKAALTLSGVQPEDEAEYYCVLWYSNRWVFGGGTKLTVLHHHHHH

SEQ ID NO: 983 - protein, 5 aa, artificial
  CDR-H1 of CDH19 16E2.1
SYGMH

SEQ ID NO: 984 - protein, 17 aa, artificial
  CDR-H2 of CDH19 16E2.1
VIWYDGSNKYYADSVKG

SEQ ID NO: 985 - protein, 9 aa, artificial
  CDR-H3 of CDH19 16E2.1
DGWELSFDY

SEQ ID NO: 986 - protein, 11 aa, artificial
  CDR-L1 of CDH19 16E2.1
RASQGISNYLA

SEQ ID NO: 987 - protein, 7 aa, artificial
  CDR-L2 of CDH19 16E2.1
AASSLQS

SEQ ID NO: 988 - protein, 9 aa, artificial
  CDR-L3 of CDH19 16E2.1
QHYFTYPRT

SEQ ID NO: 989 - DNA, 354 bp, artificial
  VH of CDH19 16E2.1
caggtgcagctggtggaatccggcggaggcgtggtgcagcctggccggtccctgagactgtcttgcgccgcctccggcttcatcttctccagctacggcatgcactgggtccgacagacccccggcaagggcctggaatgggtggccgtgatttggtacgacggctccaacaagtactacgccgactccgtgaagggccggttcaccatctcccgggacatctccaagaacaccctgtacctgcagatgaactccctgcgggtggaagataccgccgtgtactactgcgccagggacggctgggagctgtccttcgattactggggccagggcaccctggtcaccgtgtctagc

SEQ ID NO: 990 - protein, 118 aa, artificial; identical to SEQ ID NO: 350
  VH of CDH19 16E2.1

SEQ ID NO: 991 - DNA, 321 bp, artificial
  VL of CDH19 16E2.1
gacatccagatgacccagtccccctccagcctgtccgcctccgtgggcgacagagtgaccatcacctgtcgggcctcccagggcatcagcaactacctggcctggctgcagcagaagcccggcaaggcccccaagtccctgatctacgccgccagctccctgcagtccggcgtgccctccaagttctccggctctggctccggcaccgacttcaccctgaccatctccagcctgcagcccgaggacttcgccacctactactgccagcactacttcacctacccccggaccttcggacagggcaccaaggtggaaatcaag

SEQ ID NO: 992 - protein, 107 aa, artificial
  VL of CDH19 16E2.1
DIQMTQSPSSLSASVGDRVTITCRASQGISNYLAWLQQKPGKAPKSLIYAASSLQSGVPSKFSGSGSGTDFTLTISSLQPEDFATYYCQHYFTYPRTFGQGTKVEIK

SEQ ID NO: 993 - DNA, 720 bp, artificial
  VH-VL of CDH19 16E2.1
caggtgcagctggtggaatccggcggaggcgtggtgcagcctggccggtccctgagactgtcttgcgccgcctccggcttcatcttctccagctacggcatgcactgggtccgacagacccccggcaagggcctggaatgggtggccgtgatttggtacgacggctccaacaagtactacgccgactccgtgaagggccggttcaccatctcccgggacatctccaagaacaccctgtacctgcagatgaactccctgcgggtggaagataccgccgtgtactactgcgccagggacggctgggagctgtccttcgattactggggccagggcaccctggtcaccgtgtctagcggaggcggaggatctggtggcggtggttctggcggcggaggctccgacatccagatgacccagtccccctccagcctgtccgcctccgtgggcgacagagtgaccatcacctgtcgggcctcccagggcatcagcaactacctggcctggctgcagcagaagcccggcaaggcccccaagtccctgatctacgccgccagctccctgcagtccggcgtgccctccaagttctccggctctggctccggcaccgacttcaccctgaccatctccagcctgcagcccgaggacttcgccacctactactgccagcactacttcacctacccccggaccttcggacagggcaccaaggtggaaatcaag

SEQ ID NO: 994 - protein, 240 aa, artificial
  VH-VL of CDH19 16E2.1
QVQLVESGGGVVQPGRSLRLSCAASGFIFSSYGMHWVRQTPGKGLEWVAVIWYDGSNKYYADSVKGRFTISRDISKNTLYLQMNSLRVEDTAVYYCARDGWELSFDYWGQGTLVTVSSGGGGSGGGGSGGGGSDIQMTQSPSSLSASVGDRVTITCRASQGISNYLAWLQQKPGKAPKSLIYAASSLQSGVPSKFSGSGSGTDFTLTISSLQPEDFATYYCQHYFTYPRTFGQGTKVEIK

SEQ ID NO: 995 - protein, 501 aa, artificial
  CDH19 16E2.1 x I2C
QVQLVESGGGVVQPGRSLRLSCAASGFIFSSYGMHWVRQTPGKGLEWVAVIWYDGSNKYYADSVKGRFTISRDISKNTLYLQMNSLRVEDTAVYYCARDGWELSFDYWGQGTLVTVSSGGGGSGGGGSGGGGSDIQMTQSPSSLSASVGDRVTITCRASQGISNYLAWLQQKPGKAPKSLIYAASSLQSGVPSKFSGSGSGTDFTLTISSLQPEDFATYYCQHYFTYPRTFGQGTKVEIKSGGGGSEVQLVESGGGLVQPGGSLKLSCAASGFTFNKYAMNWVRQAPGKGLEWVARIRSKYNNYATYYADSVKDRFTISRDDSKNTAYLQMNNLKTEDTAVYYCVRHGNFGNSYISYWAYWGQGTLVTVSSGGGGSGGGGSGGGGSQTVVTQEPSLTVSPGGTVTLTCGSSTGAVTSGNYPNWVQQKPGQAPRGLIGGTKFLAPGTPARFSGSLLGGKAALTLSGVQPEDEAEYYCVLWYSNRWVFGGGTKLTVLHHHHHH

SEQ ID NO: 996 - protein, 5 aa, artificial
  CDR-H1 of CDH19 17H8.2
SYYWS

SEQ ID NO: 997 - protein, 16 aa, artificial
  CDR-H2 of CDH19 17H8.2
YIYYIGSTNYNPSLKS

SEQ ID NO: 998 - protein, 14 aa, artificial
  CDR-H3 of CDH19 17H8.2
DSRYRSGWYDAFDI

SEQ ID NO: 999 - protein, 12 aa, artificial
  CDR-L1 of CDH19 17H8.2
RASQSVAGSYLA

SEQ ID NO: 1000 - protein, 7 aa, artificial
  CDR-L2 of CDH19 17H8.2
GASSRAT

SEQ ID NO: 1001 - protein, 9 aa, artificial
  CDR-L3 of CDH19 17H8.2
QQYGKSPIT

SEQ ID NO: 1002 - DNA, 366 bp, artificial
  VH of CDH19 17H8.2
caggtgcagctgcaggaatccggccctggcctggtcaagccctccgagacactgtccctgacctgcaccgtgtccggcggctccatcaactcctactactggtcctggatccggcagccccctggcaagggcctggaatggatcggctacatctactacatcggctccaccaactacaaccccagcctgaagtccagagtgaccatctccgtggacacctccaagaaccagttctccctgaagctgtcctccgtgaccgccgctgacaccgccctgtactactgcgccagagactcccggtacagatccgggtggtacgacgccttcgacatctggggccagggcaccatggtcaccgtgtcctct

SEQ ID NO: 1003 - protein, 122 aa, artificial; identical to SEQ ID NO: 338
  VH of CDH19 17H8.2

SEQ ID NO: 1004 - protein, 324 aa, artificial
  VL of CDH19 17H8.2
GATATCGTGCTGACCCAGTCCCCCGGCACCCTGTCTCTGAGCCCTGGCGAGAGAGCCACCCTGTCCTGCAGAGCCTCTCAGTCCGTGGCCGGCTCCTACCTGGCTTGGTATCAGCAGAAGCCCGGCCAGGCCCCTCGGCTGCTGATCTCCGGCGCCTCTTCTAGAGCCACCGGCATCCCTGACCGGTTCTCCGGCTCTGGCTCCGGCACCGACTTCACCCTGACCATCAGCCGGCTGGAACCCGAGGACTTCGCCGTGTACTATTGCCAGCAGTACGGCAAGTCCCCCATCACCTTCGGCCAGGGAACCCGGCTGGAAATGAAG

SEQ ID NO: 1005 - protein, 108 aa, artificial
  VL of CDH19 17H8.2
DIVLTQSPGTLSLSPGERATLSCRASQSVAGSYLAWYQQKPGQAPRLLISGASSRATGIPDRFSGSGSGTDFTLTISRLEPEDFAVYYCQQYGKSPITFGQGTRLEMK

SEQ ID NO: 1006 - DNA, 735 bp, artificial
  VH-VL of CDH19 17H8.2
caggtgcagctgcaggaatccggccctggcctggtcaagccctccgagacactgtccctgacctgcaccgtgtccggcggctccatcaactcctactactggtcctggatccggcagccccctggcaagggcctggaatggatcggctacatctactacatcggctccaccaactacaaccccagcctgaagtccagagtgaccatctccgtggacacctccaagaaccagttctccctgaagctgtcctccgtgaccgccgctgacaccgccctgtactactgcgccagagactcccggtacagatccgggtggtacgacgccttcgacatctggggccagggcaccatggtcaccgtgtcctctggtggcggaggctctggcggaggtggaagcggaggcggcggatccgatatcgtgctgacccagtcccccggcaccctgtctctgagccctggcgagagagccaccctgtcctgcagagcctctcagtccgtggccggctcctacctggcttggtatcagcagaagcccggccaggcccctcggctgctgatctccggcgcctcttctagagccaccggcatccctgaccggttctccggctctggctccggcaccgacttcaccctgaccatcagccggctggaacccgaggacttcgccgtgtactattgccagcagtacggcaagtcccccatcaccttcggccagggaacccggctggaaatgaag

SEQ ID NO: 1007 - protein, 245 aa, artificial
  VH-VL of CDH19 17H8.2
QVQLQESGPGLVKPSETLSLTCTVSGGSINSYYWSWIRQPPGKGLEWIGYIYYIGSTNYNPSLKSRVTISVDTSKNQFSLKLSSVTAADTALYYCARDSRYRSGWYDAFDIWGQGTMVTVSSGGGGSGGGGSGGGGSDIVLTQSPGTLSLSPGERATLSCRASQSVAGSYLAWYQQKPGQAPRLLISGASSRATGIPDRFSGSGSGTDFTLTISRLEPEDFAVYYCQQYGKSPITFGQGTRLEMK

SEQ ID NO: 1008 - protein, 506 aa, artificial
  CDH19 17H8.2 x I2C
QVQLQESGPGLVKPSETLSLTCTVSGGSINSYYWSWIRQPPGKGLEWIGYIYYIGSTNYNPSLKSRVTISVDTSKNQFSLKLSSVTAADTALYYCARDSRYRSGWYDAFDIWGQGTMVTVSSGGGGSGGGGSGGGGSDIVLTQSPGTLSLSPGERATLSCRASQSVAGSYLAWYQQKPGQAPRLLISGASSRATGIPDRFSGSGSGTDFTLTISRLEPEDFAVYYCQQYGKSPITFGQGTRLEMKSGGGGSEVQLVESGGGLVQPGGSLKLSCAASGFTFNKYAMNWVRQAPGKGLEWVARIRSKYNNYATYYADSVKDRFTISRDDSKNTAYLQMNNLKTEDTAVYYCVRHGNFGNSYISYWAYWGQGTLVTVSSGGGGSGGGGSGGGGSQTVVTQEPSLTVSPGGTVTLTCGSSTGAVTSGNYPNWVQQKPGQAPRGLIGGTKFLAPGTPARFSGSLLGGKAALTLSGVQPEDEAEYYCVLWYSNRWVFGGGTKLTVLHHHHHH

SEQ ID NO: 1009 - protein, 5 aa, artificial
  CDR-H1 of CDH19 19B5.1
SYFIH

SEQ ID NO: 1010 - protein, 17 aa, artificial
  CDR-H2 of CDH19 19B5.1
IINPISVSTSYAQKFQG

SEQ ID NO: 1011 - protein, 11 aa, artificial
  CDR-H3 of CDH19 19B5.1
GGIQLWLHLDY

SEQ ID NO: 1012 - protein, 13 aa, artificial
  CDR-L1 of CDH19 19B5.1
SGSRSNIGSNFVN

SEQ ID NO: 1013 - protein, 7 aa, artificial
  CDR-L2 of CDH19 19B5.1
TNNQRPS

SEQ ID NO: 1014 - protein, 11 aa, artificial
  CDR-L3 of CDH19 19B5.1
ATWDDSMNGWV

SEQ ID NO: 1015 - DNA, 360 bp, artificial
  VH of CDH19 19B5.1
caggtgcagctggtgcagtctggcgccgaagtgaagaaacctggcgcctccgtgaaggtgtcctgcaaggtgtccggctacaccttcaccagctacttcatccactgggtccgacaggccccaggccagggcctggaatggatgggcatcatcaaccctatctccgtgtccacctcctacgcccagaaattccagggcagagtgaccatgacccgggacacctccacctccaccgtgttcatggaactgtcctccctgcggagcgaggacaccgccgtgtactactgcgccagaggcggcatccagctgtggctgcacctggactattggggccagggcaccctggtcaccgtgtcctct

SEQ ID NO: 1016 - protein, 120 aa, artificial; identical to SEQ ID NO: 368
  VH of CDH19 19B5.1

SEQ ID NO: 1017 - DNA, 330 bp, artificial
  VL of CDH19 19B5.1
cagtctgccctgacccagcctccctccaccaccggcacacctggccagcgcgtgaccatctcctgctccggctcccggtccaacatcggctccaacttcgtgaactggtacaagcagctgcccggcaccgcccccaaggtgctgatctacaccaacaaccagcggccctccggcgtgcccgaccggttctctggctccaagtctggcacctccgcctccctggccatctccggcctgcagtccgaggacgagtccgactactactgtgccacctgggacgactccatgaacggctgggtgttcggcggaggcaccaagctgaccgtgctg

SEQ ID NO: 1018 - protein, 110 aa, artificial
  VL of CDH19 19B5.1
QSALTQPPSTTGTPGQRVTISCSGSRSNIGSNFVNWYKQLPGTAPKVLIYTNNQRPSGVPDRFSGSKSGTSASLAISGLQSEDESDYYCATWDDSMNGWVFGGGTKLTVL

SEQ ID NO: 1019 - DNA, 735 bp, artificial
  VH-VL of CDH19 19B5.1
caggtgcagctggtgcagtctggcgccgaagtgaagaaacctggcgcctccgtgaaggtgtcctgcaaggtgtccggctacaccttcaccagctacttcatccactgggtccgacaggccccaggccagggcctggaatggatgggcatcatcaaccctatctccgtgtccacctcctacgcccagaaattccagggcagagtgaccatgacccgggacacctccacctccaccgtgttcatggaactgtcctccctgcggagcgaggacaccgccgtgtactactgcgccagaggcggcatccagctgtggctgcacctggactattggggccagggcaccctggtcaccgtgtcctctggtggcggaggatctggcggaggtggaagcggaggcggcggatctcagtctgccctgacccagcctccctccaccaccggcacacctggccagcgcgtgaccatctcctgctccggctcccggtccaacatcggctccaacttcgtgaactggtacaagcagctgcccggcaccgcccccaaggtgctgatctacaccaacaaccagcggccctccggcgtgcccgaccggttctctggctccaagtctggcacctccgcctccctggccatctccggcctgcagtccgaggacgagtccgactactactgtgccacctgggacgactccatgaacggctgggtgttcggcggaggcaccaagctgaccgtgctg

SEQ ID NO: 1020 - protein, 245 aa, artificial
  VH-VL of CDH19 19B5.1
QVQLVQSGAEVKKPGASVKVSCKVSGYTFTSYFIHWVRQAPGQGLEWMGIINPISVSTSYAQKFQGRVTMTRDTSTSTVFMELSSLRSEDTAVYYCARGGIQLWLHLDYWGQGTLVTVSSGGGGSGGGGSGGGGSQSALTQPPSTTGTPGQRVTISCSGSRSNIGSNFVNWYKQLPGTAPKVLIYTNNQRPSGVPDRFSGSKSGTSASLAISGLQSEDESDYYCATWDDSMNGWVFGGGTKLTVL

SEQ ID NO: 1021 - protein, 506 aa, artificial
  CDH19 19B5.1 x I2C
QVQLVQSGAEVKKPGASVKVSCKVSGYTFTSYFIHWVRQAPGQGLEWMGIINPISVSTSYAQKFQGRVTMTRDTSTSTVFMELSSLRSEDTAVYYCARGGIQLWLHLDYWGQGTLVTVSSGGGGSGGGGSGGGGSQSALTQPPSTTGTPGQRVTISCSGSRSNIGSNFVNWYKQLPGTAPKVLIYTNNQRPSGVPDRFSGSKSGTSASLAISGLQSEDESDYYCATWDDSMNGWVFGGGTKLTVLSGGGGSEVQLVESGGGLVQPGGSLKLSCAASGFTFNKYAMNWVRQAPGKGLEWVARIRSKYNNYATYYADSVKDRFTISRDDSKNTAYLQMNNLKTEDTAVYYCVRHGNFGNSYISYWAYWGQGTLVTVSSGGGGSGGGGSGGGGSQTVVTQEPSLTVSPGGTVTLTCGSSTGAVTSGNYPNWVQQKPGQAPRGLIGGTKFLAPGTPARFSGSLLGGKAALTLSGVQPEDEAEYYCVLWYSNRWVFGGGTKLTVLHHHHHH

SEQ ID NO: 1022 - protein, 5 aa, artificial
  CDR-H1 of CDH19 20D3.1
SYFIH

SEQ ID NO: 1023 - protein, 17 aa, artificial
  CDR-H2 of CDH19 20D3.1
IINPISVSTSYAQKFQG

SEQ ID NO: 1024 - protein, 11 aa, artificial
  CDR-H3 of CDH19 20D3.1
GGIQLWLHFDY

SEQ ID NO: 1025 - protein, 13 aa, artificial
  CDR-L1 of CDH19 20D3.1
SGSSSNIGSNFVN

SEQ ID NO: 1026 - protein, 7 aa, artificial
  CDR-L2 of CDH19 20D3.1
TNNQRPS

SEQ ID NO: 1027 - protein, 11 aa, artificial
  CDR-L3 of CDH19 20D3.1
ATWDDSLNGWV

SEQ ID NO: 1028 - DNA, 360 bp, artificial
  VH of CDH19 20D3.1
caggtgcagctggtgcagtctggcgccgaagtgaagaaacctggcgcctccgtgaaggtgtcctgcaaggtgtccggctacaccttcaccagctacttcatccactgggtccgacaggccccaggccagggcctggaatggatgggcatcatcaaccctatctccgtgtccacctcctacgcccagaaattccagggcagagtgaccatgacccgggacacctccacctccaccgtgttcatggaactgtcctccctgcggagcgaggacaccgccgtgtactactgcgccagaggcggcatccagctgtggctgcacttcgactactggggccagggcaccctggtcaccgtgtctagc

SEQ ID NO: 1029 - protein, 120 aa, artificial; identical to SEQ ID NO: 342
  VH of CDH19 20D3.1

SEQ ID NO: 1030 - DNA, 330 bp, artificial
  VL of CDH19  20D3.1
cagtctgccctgacccagcctccttctgccaccggcacccctggccagcgcgtgaccatctcctgctccggctcctcctccaacatcggctccaacttcgtgaactggtacaagcagctgcccggcaccgcccccaaggtgctgatctacaccaacaaccagcggccctccggcgtgcccgaccggttctctggctccaagtctggcacctccgcctccctggccatctccggcctgcagtccgaggacgagtccgactactactgtgccacctgggacgactccctgaacggctgggtgttcggcggaggcaccaagctgaccgtgctg

SEQ ID NO: 1031 - protein, 110 aa, artificial
  VL of CDH19  20D3.1
QSALTQPPSATGTPGQRVTISCSGSSSNIGSNFVNWYKQLPGTAPKVLIYTNNQRPSGVPDRFSGSKSGTSASLAISGLQSEDESDYYCATWDDSLNGWVFGGGTKLTVL

SEQ ID NO: 1032 - DNA, 735 bp, artificial
  VH-VL of CDH19 20D3.1
caggtgcagctggtgcagtctggcgccgaagtgaagaaacctggcgcctccgtgaaggtgtcctgcaaggtgtccggctacaccttcaccagctacttcatccactgggtccgacaggccccaggccagggcctggaatggatgggcatcatcaaccctatctccgtgtccacctcctacgcccagaaattccagggcagagtgaccatgacccgggacacctccacctccaccgtgttcatggaactgtcctccctgcggagcgaggacaccgccgtgtactactgcgccagaggcggcatccagctgtggctgcacttcgactactggggccagggcaccctggtcaccgtgtctagcggaggcggaggatctggtggcggtggttctggcggcggaggctctcagtctgccctgacccagcctccttctgccaccggcacccctggccagcgcgtgaccatctcctgctccggctcctcctccaacatcggctccaacttcgtgaactggtacaagcagctgcccggcaccgcccccaaggtgctgatctacaccaacaaccagcggccctccggcgtgcccgaccggttctctggctccaagtctggcacctccgcctccctggccatctccggcctgcagtccgaggacgagtccgactactactgtgccacctgggacgactccctgaacggctgggtgttcggcggaggcaccaagctgaccgtgctg

SEQ ID NO: 1033 - protein, 245 aa, artificial
  VH-VL of CDH19 20D3.1
QVQLVQSGAEVKKPGASVKVSCKVSGYTFTSYFIHWVRQAPGQGLEWMGIINPISVSTSYAQKFQGRVTMTRDTSTSTVFMELSSLRSEDTAVYYCARGGIQLWLHFDYWGQGTLVTVSSGGGGSGGGGSGGGGSQSALTQPPSATGTPGQRVTISCSGSSSNIGSNFVNWYKQLPGTAPKVLIYTNNQRPSGVPDRFSGSKSGTSASLAISGLQSEDESDYYCATWDDSLNGWVFGGGTKLTVL

SEQ ID NO: 1034 - protein, 506 aa, artificial
  CDH19 20D3.1 x I2C
QVQLVQSGAEVKKPGASVKVSCKVSGYTFTSYFIHWVRQAPGQGLEWMGIINPISVSTSYAQKFQGRVTMTRDTSTSTVFMELSSLRSEDTAVYYCARGGIQLWLHFDYWGQGTLVTVSSGGGGSGGGGSGGGGSQSALTQPPSATGTPGQRVTISCSGSSSNIGSNFVNWYKQLPGTAPKVLIYTNNQRPSGVPDRFSGSKSGTSASLAISGLQSEDESDYYCATWDDSLNGWVFGGGTKLTVLSGGGGSEVQLVESGGGLVQPGGSLKLSCAASGFTFNKYAMNWVRQAPGKGLEWVARIRSKYNNYATYYADSVKDRFTISRDDSKNTAYLQMNNLKTEDTAVYYCVRHGNFGNSYISYWAYWGQGTLVTVSSGGGGSGGGGSGGGGSQTVVTQEPSLTVSPGGTVTLTCGSSTGAVTSGNYPNWVQQKPGQAPRGLIGGTKFLAPGTPARFSGSLLGGKAALTLSGVQPEDEAEYYCVLWYSNRWVFGGGTKLTVLHHHHHH

SEQ ID NO: 1035 - protein, 5 aa, artificial
  CDR-H1 of CDH19 22D1.1
SYFIH

SEQ ID NO: 1036 - protein, 17 aa, artificial
  CDR-H2 of CDH19 22D1.1
IINPISVSTSYAQKFQG

SEQ ID NO: 1037 - protein, 11 aa, artificial
  CDR-H3 of CDH19 22D1.1
GGIQLWLHLDY

SEQ ID NO: 1038 - protein, 13 aa, artificial
  CDR-L1 of CDH19 22D1.1
SGSSSNIGSNFVN

SEQ ID NO: 1039 - protein, 7 aa, artificial
  CDR-L2 of CDH19 22D1.1
TNNQRPS

SEQ ID NO: 1040 - protein, 11 aa, artificial
  CDR-L3 of CDH19 22D1.1
ATWDDSMNGWV

SEQ ID NO: 1041 - DNA, 360 bp, artificial
  VH of CDH19 22D1.1
caggtgcagctggtgcagtctggcgccgaagtgaagaaacctggcgcctccgtgcgggtgtcctgcaaggtgtccggctacaccttcaccagctacttcatccactgggtccgacaggccccaggccagggcctggaatggatgggcatcatcaaccctatctccgtgtccacctcctacgcccagaaattccagggcagagtgaccatgacccgggacacctccacctccaccgtgttcatggaactgtcctccctgcggagcgaggacaccgccgtgtactactgcgccagaggcggcatccagctgtggctgcacctggactattggggccagggcaccctggtcaccgtgtcctct

SEQ ID NO: 1042 - protein, 120 aa, artificial; identical to SEQ ID NO: 366
  VH of CDH19 22D1.1

SEQ ID NO: 1043 - DNA, 330 bp, artificial
  VL of CDH19 22D1.1
cagtctgccctgacccagcctccttccgctaccggcacccctggccagcgcgtgaccatctcctgctccggctcctcctccaacatcggctccaacttcgtgaactggtacaagcagctgcccggcaccgcccccaaggtgctgatctacaccaacaaccagcggccctccggcgtgcccgaccggttctctggctccaagtctggcacctccgcctccctggccatctccggcctgcagtccgaggacgagtccgactactactgtgccacctgggacgactccatgaacggctgggtgttcggcggaggcaccaagctgaccgtgctg

SEQ ID NO: 1044 - protein, 110 aa, artificial
  VL of CDH19 22D1.1
QSALTQPPSATGTPGQRVTISCSGSSSNIGSNFVNWYKQLPGTAPKVLIYTNNQRPSGVPDRFSGSKSGTSASLAISGLQSEDESDYYCATWDDSMNGWVFGGGTKLTVL

SEQ ID NO: 1045 - DNA, 735 bp, artificial
  VH-VL of CDH19 22D1.1
caggtgcagctggtgcagtctggcgccgaagtgaagaaacctggcgcctccgtgcgggtgtcctgcaaggtgtccggctacaccttcaccagctacttcatccactgggtccgacaggccccaggccagggcctggaatggatgggcatcatcaaccctatctccgtgtccacctcctacgcccagaaattccagggcagagtgaccatgacccgggacacctccacctccaccgtgttcatggaactgtcctccctgcggagcgaggacaccgccgtgtactactgcgccagaggcggcatccagctgtggctgcacctggactattggggccagggcaccctggtcaccgtgtcctctggtggcggaggatctggcggaggtggaagcggaggcggcggatctcagtctgccctgacccagcctccttccgctaccggcacccctggccagcgcgtgaccatctcctgctccggctcctcctccaacatcggctccaacttcgtgaactggtacaagcagctgcccggcaccgcccccaaggtgctgatctacaccaacaaccagcggccctccggcgtgcccgaccggttctctggctccaagtctggcacctccgcctccctggccatctccggcctgcagtccgaggacgagtccgactactactgtgccacctgggacgactccatgaacggctgggtgttcggcggaggcaccaagctgaccgtgctg

SEQ ID NO: 1046 - protein, 245 aa, artificial
  VH-VL of CDH19 22D1.1
QVQLVQSGAEVKKPGASVRVSCKVSGYTFTSYFIHWVRQAPGQGLEWMGIINPISVSTSYAQKFQGRVTMTRDTSTSTVFMELSSLRSEDTAVYYCARGGIQLWLHLDYWGQGTLVTVSSGGGGSGGGGSGGGGSQSALTQPPSATGTPGQRVTISCSGSSSNIGSNFVNWYKQLPGTAPKVLIYTNNQRPSGVPDRFSGSKSGTSASLAISGLQSEDESDYYCATWDDSMNGWVFGGGTKLTVL

SEQ ID NO: 1047 - protein, 506 aa, artificial
  CDH19 22D1.1 x I2C
QVQLVQSGAEVKKPGASVRVSCKVSGYTFTSYFIHWVRQAPGQGLEWMGIINPISVSTSYAQKFQGRVTMTRDTSTSTVFMELSSLRSEDTAVYYCARGGIQLWLHLDYWGQGTLVTVSSGGGGSGGGGSGGGGSQSALTQPPSATGTPGQRVTISCSGSSSNIGSNFVNWYKQLPGTAPKVLIYTNNQRPSGVPDRFSGSKSGTSASLAISGLQSEDESDYYCATWDDSMNGWVFGGGTKLTVLSGGGGSEVQLVESGGGLVQPGGSLKLSCAASGFTFNKYAMNWVRQAPGKGLEWVARIRSKYNNYATYYADSVKDRFTISRDDSKNTAYLQMNNLKTEDTAVYYCVRHGNFGNSYISYWAYWGQGTLVTVSSGGGGSGGGGSGGGGSQTVVTQEPSLTVSPGGTVTLTCGSSTGAVTSGNYPNWVQQKPGQAPRGLIGGTKFLAPGTPARFSGSLLGGKAALTLSGVQPEDEAEYYCVLWYSNRWVFGGGTKLTVLHHHHHH

SEQ ID NO: 1048 - protein, 5 aa, artificial
  CDR-H1 of CDH19 22G10.1
SYAMN

SEQ ID NO: 1049 - protein, 17 aa, artificial
  CDR-H2 of CDH19 22G10.1
TISGGGANTYYADSVKG

SEQ ID NO: 1050 - protein, 12 aa, artificial
  CDR-H3 of CDH19 22G10.1
GGMGGYYYGMDV

SEQ ID NO: 1051 - protein, 11 aa, artificial
  CDR-L1 of CDH19 22G10.1
RASQSISSNLA

SEQ ID NO: 1052 - protein, 7 aa, artificial
  CDR-L2 of CDH19 22G10.1
GAFTRAT

SEQ ID NO: 1053 - protein, 9 aa, artificial
  CDR-L3 of CDH19 22G10.1
QQYNYWPLT

SEQ ID NO: 1054 - DNA, 363 bp, artificial
  VH of CDH19 22G10.1
gaggtgcagctgctggaatccggcggaggactggtgcagcctggcggctccctgagactgtcttgcgccgcctccggcttcaccttctccagctacgccatgaactgggtccgacaggcccctggcaagggcctggaatgggtgtccaccatcagcggcggaggcgccaacacctactacgccgactccgtgaagggccggttcaccatctcctccgacaactccaagtccaccctgtacctgcagatgaactccctgagagccgccgacaccgccgtgtaccactgtgctaagggcggcatgggcggctactactacggcatggatgtgtggggccagggcaccaccgtgaccgtgtctagc

SEQ ID NO: 1055 - protein, 121 aa, artificial; identical to SEQ ID NO: 378
  VH of CDH19 22G10.1

SEQ ID NO: 1056 - DNA, 321 bp, artificial
  VL of CDH19 22G10.1
gagatcgtgatgacccagtcccccgtgaccctgtccctgagcctgggcgagagagccaccctgtcttgccgggcctcccagtccatctccagcaacctggcctggttccagcagaagcccggccaggcccctcggctgctgatctacggcgcctttacccgggccaccggcatccctgccagagtgtctggctccggctccggcaccgagttcaccctgaccatcagctccctgcagtccgaggactttgccgtgtactactgccagcagtacaactactggcccctgaccttcggaggcggcaccaaggtggaaatcaag

SEQ ID NO: 1057 - protein, 107 aa, artificial
  VL of CDH19 22G10.1
EIVMTQSPVTLSLSLGERATLSCRASQSISSNLAWFQQKPGQAPRLLIYGAFTRATGIPARVSGSGSGTEFTLTISSLQSEDFAVYYCQQYNYWPLTFGGGTKVEIK

SEQ ID NO: 1058 - DNA, 729 bp, artificial
  VH-VL of CDH19 22G10.1
gaggtgcagctgctggaatccggcggaggactggtgcagcctggcggctccctgagactgtcttgcgccgcctccggcttcaccttctccagctacgccatgaactgggtccgacaggcccctggcaagggcctggaatgggtgtccaccatcagcggcggaggcgccaacacctactacgccgactccgtgaagggccggttcaccatctcctccgacaactccaagtccaccctgtacctgcagatgaactccctgagagccgccgacaccgccgtgtaccactgtgctaagggcggcatgggcggctactactacggcatggatgtgtggggccagggcaccaccgtgaccgtgtctagcggaggcggaggatctggcggtggtggttctggcggaggcggctccgagatcgtgatgacccagtcccccgtgaccctgtccctgagcctgggcgagagagccaccctgtcttgccgggcctcccagtccatctccagcaacctggcctggttccagcagaagcccggccaggcccctcggctgctgatctacggcgcctttacccgggccaccggcatccctgccagagtgtctggctccggctccggcaccgagttcaccctgaccatcagctccctgcagtccgaggactttgccgtgtactactgccagcagtacaactactggcccctgaccttcggaggcggcaccaaggtggaaatcaag

SEQ ID NO: 1059 - protein, 243 aa, artificial
  VH-VL of CDH19 22G10.1
EVQLLESGGGLVQPGGSLRLSCAASGFTFSSYAMNWVRQAPGKGLEWVSTISGGGANTYYADSVKGRFTISSDNSKSTLYLQMNSLRAADTAVYHCAKGGMGGYYYGMDVWGQGTTVTVSSGGGGSGGGGSGGGGSEIVMTQSPVTLSLSLGERATLSCRASQSISSNLAWFQQKPGQAPRLLIYGAFTRATGIPARVSGSGSGTEFTLTISSLQSEDFAVYYCQQYNYWPLTFGGGTKVEIK

SEQ ID NO: 1060 - protein, 504 aa, artificial
  CDH19 22G10.1 x I2C
EVQLLESGGGLVQPGGSLRLSCAASGFTFSSYAMNWVRQAPGKGLEWVSTISGGGANTYYADSVKGRFTISSDNSKSTLYLQMNSLRAADTAVYHCAKGGMGGYYYGMDVWGQGTTVTVSSGGGGSGGGGSGGGGSEIVMTQSPVTLSLSLGERATLSCRASQSISSNLAWFQQKPGQAPRLLIYGAFTRATGIPARVSGSGSGTEFTLTISSLQSEDFAVYYCQQYNYWPLTFGGGTKVEIKSGGGGSEVQLVESGGGLVQPGGSLKLSCAASGFTFNKYAMNWVRQAPGKGLEWVARIRSKYNNYATYYADSVKDRFTISRDDSKNTAYLQMNNLKTEDTAVYYCVRHGNFGNSYISYWAYWGQGTLVTVSSGGGGSGGGGSGGGGSQTVVTQEPSLTVSPGGTVTLTCGSSTGAVTSGNYPNWVQQKPGQAPRGLIGGTKFLAPGTPARFSGSLLGGKAALTLSGVQPEDEAEYYCVLWYSNRWVFGGGTKLTVLHHHHHH

SEQ ID NO: 1061 - protein, 5 aa, artificial
  CDR-H1 of CDH19 23A10.3
RYGIH

SEQ ID NO: 1062 - protein, 17 aa, artificial
  CDR-H2 of CDH19 23A10.3
VIWYDGSNKYYADSVKG

SEQ ID NO: 1063 - protein, 16 aa, artificial
  CDR-H3 of CDH19 23A10.3
RAGIPGTTGYYYGMDV

SEQ ID NO: 1064 - protein, 11 aa, artificial
  CDR-L1 of CDH19 23A10.3
SGDRLGEKYVC

SEQ ID NO: 1065 - protein, 7 aa, artificial
  CDR-L2 of CDH19 23A10.3
QDNKWPS

SEQ ID NO: 1066 - protein, 9 aa, artificial
  CDR-L3 of CDH19 23A10.3
QAWDSSTVV

SEQ ID NO: 1067 - protein, 375 aa, artificial
  VH of CDH19 23A10.3
CAGGTGCAGCTGGTGGAATCCGGCGGAGGCGTGGTGCAGCCTGGCCGGTCCCTGAGACTGTCTTGCGCCGCCTCCGGCTTCACCTTCTCCAGATACGGCATCCACTGGGTCCGACAGGCCCCTGGCAAGGGCCTGGAATGGGTGGCCGTGATTTGGTACGACGGCTCCAACAAGTACTACGCCGACTCCGTGAAGGGCCGGTTCACCATCTCCCGGGACAACTCCAAGAACACCCTGTACCTGCTGATGAACTCCCTGCGGGCCGAGGACTCCGCCGTGTACTACTGTGCCAGAAGGGCCGGCATCCCCGGCACCACCGGCTACTACTACGGCATGGATGTGTGGGGCCAGGGCACCACCGTGACCGTGTCTAGC

SEQ ID NO: 1068 - protein, 125 aa, artificial; identical to SEQ ID NO: 390
  VH of CDH19 23A10.3

SEQ ID NO: 1069 - DNA, 315 bp, artificial
  VL of CDH19 23A10.3
tacgagctgacccagcccccctccgtgtccgtgtctcctggccagaccgcctccatcacctgttctggcgaccggctgggcgagaaatacgtgtgctggtatcagcagaagcccggccagtcccccatcctggtcatctaccaggacaacaagtggccctccggcatccctgagcggttctccggctccaactccggcaacaccgccaccctgaccatctccggcacccaggccatggacgaggccgactactactgccaggcctgggactcctccaccgtggtgttcggcggaggcaccaagctgaccgtgctg

SEQ ID NO: 1070 - protein, 106 aa, artificial
  VL of CDH19 23A10.3
SYELTQPPSVSVSPGQTASITCSGDRLGEKYVCWYQQKPGQSPILVIYQDNKWPSGIPERFSGSNSGNTATLTISGTQAMDEADYYCQAWDSSTVVFGGGTKLTVL

SEQ ID NO: 1071 - DNA, 738 bp, artificial
  VH-VL of CDH19 23A10.3
caggtgcagctggtggaatccggcggaggcgtggtgcagcctggccggtccctgagactgtcttgcgccgcctccggcttcaccttctccagatacggcatccactgggtccgacaggcccctggcaagggcctggaatgggtggccgtgatttggtacgacggctccaacaagtactacgccgactccgtgaagggccggttcaccatctcccgggacaactccaagaacaccctgtacctgctgatgaactccctgcgggccgaggactccgccgtgtactactgtgccagaagggccggcatccccggcaccaccggctactactacggcatggatgtgtggggccagggcaccaccgtgaccgtgtctagcggaggcggaggatctggtggcggtggttctggcggcggaggctcctcttacgagctgacccagcccccctccgtgtccgtgtctcctggccagaccgcctccatcacctgttctggcgaccggctgggcgagaaatacgtgtgctggtatcagcagaagcccggccagtcccccatcctggtcatctaccaggacaacaagtggccctccggcatccctgagcggttctccggctccaactccggcaacaccgccaccctgaccatctccggcacccaggccatggacgaggccgactactactgccaggcctgggactcctccaccgtggtgttcggcggaggcaccaagctgaccgtgctg

SEQ ID NO: 1072 - protein, 246 aa, artificial
  VH-VL of CDH19 23A10.3
QVQLVESGGGVVQPGRSLRLSCAASGFTFSRYGIHWVRQAPGKGLEWVAVIWYDGSNKYYADSVKGRFTISRDNSKNTLYLLMNSLRAEDSAVYYCARRAGIPGTTGYYYGMDVWGQGTTVTVSSGGGGSGGGGSGGGGSSYELTQPPSVSVSPGQTASITCSGDRLGEKYVCWYQQKPGQSPILVIYQDNKWPSGIPERFSGSNSGNTATLTISGTQAMDEADYYCQAWDSSTVVFGGGTKLTVL

SEQ ID NO: 1073 - protein, 507 aa, artificial
  CDH19 23A10.3 x I2C
QVQLVESGGGVVQPGRSLRLSCAASGFTFSRYGIHWVRQAPGKGLEWVAVIWYDGSNKYYADSVKGRFTISRDNSKNTLYLLMNSLRAEDSAVYYCARRAGIPGTTGYYYGMDVWGQGTTVTVSSGGGGSGGGGSGGGGSSYELTQPPSVSVSPGQTASITCSGDRLGEKYVCWYQQKPGQSPILVIYQDNKWPSGIPERFSGSNSGNTATLTISGTQAMDEADYYCQAWDSSTVVFGGGTKLTVLSGGGGSEVQLVESGGGLVQPGGSLKLSCAASGFTFNKYAMNWVRQAPGKGLEWVARIRSKYNNYATYYADSVKDRFTISRDDSKNTAYLQMNNLKTEDTAVYYCVRHGNFGNSYISYWAYWGQGTLVTVSSGGGGSGGGGSGGGGSQTVVTQEPSLTVSPGGTVTLTCGSSTGAVTSGNYPNWVQQKPGQAPRGLIGGTKFLAPGTPARFSGSLLGGKAALTLSGVQPEDEAEYYCVLWYSNRWVFGGGTKLTVLHHHHHH

SEQ ID NO: 1074 - protein, 5 aa, artificial
  CDR-H1 of CDH19 25F8.1
SYYIH

SEQ ID NO: 1075 - protein, 17 aa, artificial
  CDR-H2 of CDH19 25F8.1
IINPSGGSTRYAQKFQG

SEQ ID NO: 1076 - protein, 11 aa, artificial
  CDR-H3 of CDH19 25F8.1
GGIQLWLHFDY

SEQ ID NO: 1077 - protein, 13 aa, artificial
  CDR-L1 of CDH19 25F8.1
SGSSSNIGRNFVN

SEQ ID NO: 1078 - protein, 7 aa, artificial
  CDR-L2 of CDH19 25F8.1
TNNQRPS

SEQ ID NO: 1079 - protein, 11 aa, artificial
  CDR-L3 of CDH19 25F8.1
AAWDDSLNGWV

SEQ ID NO: 1080 - DNA, 360 bp, artificial
  VH of CDH19 25F8.1
caggtgcagctggtgcagtctggcgccgaagtgaagaaacctggcgcctccgtgaaggtgtcctgcaaggcctccggctacaccttcaccagctactacatccactgggtccgacaggccccaggccagggcctggaatggatgggcatcatcaacccctccggcggctccaccagatacgcccagaaattccagggcagagtgaccatgacccgggacacctccacctccaccgtgttcatggaactgtcctccctgcggagcgaggacaccgccgtgtactactgcgccagaggcggcatccagctgtggctgcacttcgactactggggccagggcaccctggtcaccgtgtctagc

SEQ ID NO: 1081 - protein, 120 aa, artificial; identical to SEQ ID NO: 370
  VH of CDH19 25F8.1

SEQ ID NO: 1082 - DNA, 330 bp, artificial
  VL of CDH19 25F8.1
cagtctgccctgacccagcctccttctgccaccggcacccctggccagcgcgtgaccatctcctgctccggctcctcctccaacatcggccggaacttcgtgaactggtacaagcagctgcccggcaccgcccccaaggtgctgatctacaccaacaaccagcggccctccggcgtgcccgaccggttctctggctccaagtctggcacctccgcctccctggccatctccggcctgcagtccgaggacgagtccgactactactgtgccgcctgggacgactccctgaacggctgggtgttcggcggaggcaccaagctgaccgtgctg

SEQ ID NO: 1083 - protein, 110 aa, artificial
  VL of CDH19 25F8.1
QSALTQPPSATGTPGQRVTISCSGSSSNIGRNFVNWYKQLPGTAPKVLIYTNNQRPSGVPDRFSGSKSGTSASLAISGLQSEDESDYYCAAWDDSLNGWVFGGGTKLTVL

SEQ ID NO: 1084 - DNA, 735 bp, artificial
  VH-VL of CDH19 25F8.1
caggtgcagctggtgcagtctggcgccgaagtgaagaaacctggcgcctccgtgaaggtgtcctgcaaggcctccggctacaccttcaccagctactacatccactgggtccgacaggccccaggccagggcctggaatggatgggcatcatcaacccctccggcggctccaccagatacgcccagaaattccagggcagagtgaccatgacccgggacacctccacctccaccgtgttcatggaactgtcctccctgcggagcgaggacaccgccgtgtactactgcgccagaggcggcatccagctgtggctgcacttcgactactggggccagggcaccctggtcaccgtgtctagcggaggcggaggatctggtggcggtggttctggcggcggaggctctcagtctgccctgacccagcctccttctgccaccggcacccctggccagcgcgtgaccatctcctgctccggctcctcctccaacatcggccggaacttcgtgaactggtacaagcagctgcccggcaccgcccccaaggtgctgatctacaccaacaaccagcggccctccggcgtgcccgaccggttctctggctccaagtctggcacctccgcctccctggccatctccggcctgcagtccgaggacgagtccgactactactgtgccgcctgggacgactccctgaacggctgggtgttcggcggaggcaccaagctgaccgtgctg

SEQ ID NO: 1085 - protein, 245 aa, artificial
  VH-VL of CDH19 25F8.1
QVQLVQSGAEVKKPGASVKVSCKASGYTFTSYYIHWVRQAPGQGLEWMGIINPSGGSTRYAQKFQGRVTMTRDTSTSTVFMELSSLRSEDTAVYYCARGGIQLWLHFDYWGQGTLVTVSSGGGGSGGGGSGGGGSQSALTQPPSATGTPGQRVTISCSGSSSNIGRNFVNWYKQLPGTAPKVLIYTNNQRPSGVPDRFSGSKSGTSASLAISGLQSEDESDYYCAAWDDSLNGWVFGGGTKLTVL

SEQ ID NO: 1086 - protein, 506 aa, artificial
  CDH19 25F8.1 x I2C
QVQLVQSGAEVKKPGASVKVSCKASGYTFTSYYIHWVRQAPGQGLEWMGIINPSGGSTRYAQKFQGRVTMTRDTSTSTVFMELSSLRSEDTAVYYCARGGIQLWLHFDYWGQGTLVTVSSGGGGSGGGGSGGGGSQSALTQPPSATGTPGQRVTISCSGSSSNIGRNFVNWYKQLPGTAPKVLIYTNNQRPSGVPDRFSGSKSGTSASLAISGLQSEDESDYYCAAWDDSLNGWVFGGGTKLTVLSGGGGSEVQLVESGGGLVQPGGSLKLSCAASGFTFNKYAMNWVRQAPGKGLEWVARIRSKYNNYATYYADSVKDRFTISRDDSKNTAYLQMNNLKTEDTAVYYCVRHGNFGNSYISYWAYWGQGTLVTVSSGGGGSGGGGSGGGGSQTVVTQEPSLTVSPGGTVTLTCGSSTGAVTSGNYPNWVQQKPGQAPRGLIGGTKFLAPGTPARFSGSLLGGKAALTLSGVQPEDEAEYYCVLWYSNRWVFGGGTKLTVLHHHHHH

SEQ ID NO: 1087 - protein, 5 aa, artificial
  CDR-H1 of CDH19 25G10.1
GYYWS

SEQ ID NO: 1088 - protein, 16 aa, artificial
  CDR-H2 of CDH19 25G10.1
YIYYIGSTNYNPSLKS

SEQ ID NO: 1089 - protein, 12 aa, artificial
  CDR-H3 of CDH19 25G10.1
DGSSGWYRWFDP

SEQ ID NO: 1090 - protein, 12 aa, artificial
  CDR-L1 of CDH19 25G10.1
RASQSVSSSYLA

SEQ ID NO: 1091 - protein, 7 aa, artificial
  CDR-L2 of CDH19 25G10.1
GASSRAT

SEQ ID NO: 1092 - protein, 9 aa, artificial
  CDR-L3 of CDH19 25G10.1
QQYGNSPLT

SEQ ID NO: 1093 - DNA, 360 bp, artificial
  VH of CDH19 25G10.1
caggtgcagctgcaggaatccggccctggcctggtcaagccctccgagacactgtccctgacctgcaccgtgtccggcggctccatctccggctactactggtcctggatccggcagccccctggcaagggcctggaatggatcggctacatctactacatcggctccaccaactacaaccccagcctgaagtccagagtgaccatgtccgtggacacctccaagaaccagttctccctgaagctgtcctccgtgaccgccgctgacaccgccgtgtactactgcgccagagatggctcctccggctggtatcgttggttcgacccttggggccagggcaccctggtcaccgtgtctagc

SEQ ID NO: 1094 - protein, 120 aa, artificial; identical to SEQ ID NO: 461
  VH of CDH19 25G10.1

SEQ ID NO: 1095 - DNA, 324 bp, artificial
  VL of CDH19 25G10.1
gagatcgtgctgacccagtcccctggcaccctgtccctgagccctggcgagagagccaccctgtcctgcagagcctcccagtccgtgtcctcctcctacctggcttggtatcagcagaagcccggccaggcccctcggctgctgatcttcggcgcctcttccagagccaccggcatccctgaccggttctccggctctggctccggcaccgacttcaccctgaccatctcccggctggaacccgaggacttcgctgtgtaccactgccagcagtacggcaacagccccctgaccttcggcggaggcaccaaggtggaaatcaag

SEQ ID NO: 1096 - protein, 108 aa, artificial
  VL of CDH19 25G10.1
EIVLTQSPGTLSLSPGERATLSCRASQSVSSSYLAWYQQKPGQAPRLLIFGASSRATGIPDRFSGSGSGTDFTLTISRLEPEDFAVYHCQQYGNSPLTFGGGTKVEIK

SEQ ID NO: 1097 - DNA, 729 bp, artificial
  VH-VL of CDH19 25G10.1
caggtgcagctgcaggaatccggccctggcctggtcaagccctccgagacactgtccctgacctgcaccgtgtccggcggctccatctccggctactactggtcctggatccggcagccccctggcaagggcctggaatggatcggctacatctactacatcggctccaccaactacaaccccagcctgaagtccagagtgaccatgtccgtggacacctccaagaaccagttctccctgaagctgtcctccgtgaccgccgctgacaccgccgtgtactactgcgccagagatggctcctccggctggtatcgttggttcgacccttggggccagggcaccctggtcaccgtgtctagcggaggcggaggatctggtggcggtggttctggcggcggaggctccgagatcgtgctgacccagtcccctggcaccctgtccctgagccctggcgagagagccaccctgtcctgcagagcctcccagtccgtgtcctcctcctacctggcttggtatcagcagaagcccggccaggcccctcggctgctgatcttcggcgcctcttccagagccaccggcatccctgaccggttctccggctctggctccggcaccgacttcaccctgaccatctcccggctggaacccgaggacttcgctgtgtaccactgccagcagtacggcaacagccccctgaccttcggcggaggcaccaaggtggaaatcaag

SEQ ID NO: 1098 - protein, 243 aa, artificial
  VH-VL of CDH19 25G10.1
QVQLQESGPGLVKPSETLSLTCTVSGGSISGYYWSWIRQPPGKGLEWIGYIYYIGSTNYNPSLKSRVTMSVDTSKNQFSLKLSSVTAADTAVYYCARDGSSGWYRWFDPWGQGTLVTVSSGGGGSGGGGSGGGGSEIVLTQSPGTLSLSPGERATLSCRASQSVSSSYLAWYQQKPGQAPRLLIFGASSRATGIPDRFSGSGSGTDFTLTISRLEPEDFAVYHCQQYGNSPLTFGGGTKVEIK

SEQ ID NO: 1099 - protein, 504 aa, artificial
  CDH19 25G10.1 x I2C
QVQLQESGPGLVKPSETLSLTCTVSGGSISGYYWSWIRQPPGKGLEWIGYIYYIGSTNYNPSLKSRVTMSVDTSKNQFSLKLSSVTAADTAVYYCARDGSSGWYRWFDPWGQGTLVTVSSGGGGSGGGGSGGGGSEIVLTQSPGTLSLSPGERATLSCRASQSVSSSYLAWYQQKPGQAPRLLIFGASSRATGIPDRFSGSGSGTDFTLTISRLEPEDFAVYHCQQYGNSPLTFGGGTKVEIKSGGGGSEVQLVESGGGLVQPGGSLKLSCAASGFTFNKYAMNWVRQAPGKGLEWVARIRSKYNNYATYYADSVKDRFTISRDDSKNTAYLQMNNLKTEDTAVYYCVRHGNFGNSYISYWAYWGQGTLVTVSSGGGGSGGGGSGGGGSQTVVTQEPSLTVSPGGTVTLTCGSSTGAVTSGNYPNWVQQKPGQAPRGLIGGTKFLAPGTPARFSGSLLGGKAALTLSGVQPEDEAEYYCVLWYSNRWVFGGGTKLTVLHHHHHH

SEQ ID NO: 1100 - protein, 5 aa, artificial
  CDR-H1 of CDH19 26D1.1
SYYMS

SEQ ID NO: 1101 - protein, 17 aa, artificial
  CDR-H2 of CDH19 26D1.1
IIHPSGGDTTYAQKFQG

SEQ ID NO: 1102 - protein, 11 aa, artificial
  CDR-H3 of CDH19 26D1.1
GGIKLWLHFDY

SEQ ID NO: 1103 - protein, 13 aa, artificial
  CDR-L1 of CDH19 26D1.1
SGSRSNIGSNFVN

SEQ ID NO: 1104 - protein, 7 aa, artificial
  CDR-L2 of CDH19 26D1.1
TNNQRPS

SEQ ID NO: 1105 - protein, 11 aa, artificial
  CDR-L3 of CDH19 26D1.1
AVWDDSLNGWV

SEQ ID NO: 1106 - DNA, 360 bp, artificial
  VH of CDH19 26D1.1
caggtgcagctggtgcagtctggcgccgaagtgaagaaacctggcgcctccgtgaaggtgtcctgcaaggcctcccggtacaccttcaccagctactacatgtcctgggtccgacaggccccaggccagggcctggaatggatgggcatcatccacccctctggcggcgacaccacctacgcccagaaattccagggcagagtgaccatgaccggcgacacctccacctccaccgtgtatatggaactgtcctccctgcggagcgaggacaccgccgtgtactactgcgccagaggcggcatcaagctgtggctgcacttcgactactggggccagggcaccctggtcaccgtgtctagc

SEQ ID NO: 1107 - protein, 120 aa, artificial; identical to SEQ ID NO: 372
  VH of CDH19 26D1.1

SEQ ID NO: 1108 - DNA, 330 bp, artificial
  VL of CDH19 26D1.1
cattccgtgctgacccagtctccttccgcctccggcacccctggccagcgcgtgaccatctcctgctccggctcccggtccaacatcggctccaacttcgtgaactggtatcagcagctgcccggcaccgcccccaagctgctgatctacaccaacaaccagcggccctccggcgtgcccgaccggttctctggctccaagtctggcacctccgcctccctggccatctccggcctgcagtctgaggacgaggccgactactactgtgccgtgtgggacgactccctgaacggctgggtgttcggcggaggcaccaagctgaccgtgctg

SEQ ID NO: 1109 - protein, 110 aa, artificial
  VL of CDH19 26D1.1
HSVLTQSPSASGTPGQRVTISCSGSRSNIGSNFVNWYQQLPGTAPKLLIYTNNQRPSGVPDRFSGSKSGTSASLAISGLQSEDEADYYCAVWDDSLNGWVFGGGTKLTVL

SEQ ID NO: 1110 - DNA, 735 bp, artificial
  VH-VL of CDH19 26D1.1
caggtgcagctggtgcagtctggcgccgaagtgaagaaacctggcgcctccgtgaaggtgtcctgcaaggcctcccggtacaccttcaccagctactacatgtcctgggtccgacaggccccaggccagggcctggaatggatgggcatcatccacccctctggcggcgacaccacctacgcccagaaattccagggcagagtgaccatgaccggcgacacctccacctccaccgtgtatatggaactgtcctccctgcggagcgaggacaccgccgtgtactactgcgccagaggcggcatcaagctgtggctgcacttcgactactggggccagggcaccctggtcaccgtgtctagcggaggcggaggatctggtggcggtggttctggcggcggaggctcccattccgtgctgacccagtctccttccgcctccggcacccctggccagcgcgtgaccatctcctgctccggctcccggtccaacatcggctccaacttcgtgaactggtatcagcagctgcccggcaccgcccccaagctgctgatctacaccaacaaccagcggccctccggcgtgcccgaccggttctctggctccaagtctggcacctccgcctccctggccatctccggcctgcagtctgaggacgaggccgactactactgtgccgtgtgggacgactccctgaacggctgggtgttcggcggaggcaccaagctgaccgtgctg

SEQ ID NO: 1111 - protein, 245 aa, artificial
  VH-VL of CDH19 26D1.1
QVQLVQSGAEVKKPGASVKVSCKASRYTFTSYYMSWVRQAPGQGLEWMGIIHPSGGDTTYAQKFQGRVTMTGDTSTSTVYMELSSLRSEDTAVYYCARGGIKLWLHFDYWGQGTLVTVSSGGGGSGGGGSGGGGSHSVLTQSPSASGTPGQRVTISCSGSRSNIGSNFVNWYQQLPGTAPKLLIYTNNQRPSGVPDRFSGSKSGTSASLAISGLQSEDEADYYCAVWDDSLNGWVFGGGTKLTVL

SEQ ID NO: 1112 - protein, 7 aa, artificial
  CDH19 26D1.1 x I2C
  misc_feature (5)..(5): Xaa can be any naturally occurring amino acid
CDHDXIC

SEQ ID NO: 1113 - protein, 5 aa, artificial
  CDR-H1 of CDH19 26F12.1
NYYMS

SEQ ID NO: 1114 - protein, 17 aa, artificial
  CDR-H2 of CDH19 26F12.1
IINPSGGDSTYAQKFQG

SEQ ID NO: 1115 - protein, 11 aa, artificial
  CDR-H3 of CDH19 26F12.1
GGIQLWLHFDY

SEQ ID NO: 1116 - protein, 13 aa, artificial
  CDR-L1 of CDH19 26F12.1
SGSRSNIGSNFVN

SEQ ID NO: 1117 - protein, 7 aa, artificial
  CDR-L2 of CDH19 26F12.1
TNYQRPS

SEQ ID NO: 1118 - protein, 11 aa, artificial
  CDR-L3 of CDH19 26F12.1
AVWDDSLNGWV

SEQ ID NO: 1119 - DNA, 360 bp, artificial
  VH of CDH19 26F12.1
caggtgcagctggtgcagtctggcgccgaagtgaagaaacctggcgcctccgtgaaggtgtcctgcaaggcctcccggtacaccttcaccaactactacatgtcctgggtccgacaggccccaggccagggcctggaatggatgggcatcatcaacccctctggcggcgactccacctacgcccagaagttccagggccggctgaccatgaccggcgacacctccacctccaccgtgtatatggaactgtcctccctgcggagcgaggacaccgccgtgtactactgcgccagaggcggcatccagctgtggctgcacttcgactactggggccagggcaccctggtcaccgtgtctagc

SEQ ID NO: 1120 - protein, 120 aa, artificial; identical to SEQ ID NO: 344
  VH of CDH19 26F12.1

SEQ ID NO: 1121 - DNA, 330 bp, artificial
  VL of CDH19 26F12.1
cagtctgtgctgacccagtccccttccgcctctggcacccctggccagaaagtgaccatctcctgctccggctcccggtccaacatcggctccaacttcgtgaactggtatcagcagctgcccggcaccgcccccaagctgctgatctacaccaactaccagcggccctccggcgtgcccgaccggttctctggctccaagtctggcacctccgcctccctggccatctccggcctgcagtctgaggacgaggccgactactactgtgccgtgtgggacgactccctgaacggctgggtgttcggcggaggcaccaagctgaccgtgctg

SEQ ID NO: 1122 - protein, 110 aa, artificial
  VL of CDH19 26F12.1
QSVLTQSPSASGTPGQKVTISCSGSRSNIGSNFVNWYQQLPGTAPKLLIYTNYQRPSGVPDRFSGSKSGTSASLAISGLQSEDEADYYCAVWDDSLNGWVFGGGTKLTVL

SEQ ID NO: 1123 - DNA, 735 bp, artificial
  VH-VL of CDH19 26F12.1
caggtgcagctggtgcagtctggcgccgaagtgaagaaacctggcgcctccgtgaaggtgtcctgcaaggcctcccggtacaccttcaccaactactacatgtcctgggtccgacaggccccaggccagggcctggaatggatgggcatcatcaacccctctggcggcgactccacctacgcccagaagttccagggccggctgaccatgaccggcgacacctccacctccaccgtgtatatggaactgtcctccctgcggagcgaggacaccgccgtgtactactgcgccagaggcggcatccagctgtggctgcacttcgactactggggccagggcaccctggtcaccgtgtctagcggaggcggaggatctggtggcggtggttctggcggcggaggctcccagtctgtgctgacccagtccccttccgcctctggcacccctggccagaaagtgaccatctcctgctccggctcccggtccaacatcggctccaacttcgtgaactggtatcagcagctgcccggcaccgcccccaagctgctgatctacaccaactaccagcggccctccggcgtgcccgaccggttctctggctccaagtctggcacctccgcctccctggccatctccggcctgcagtctgaggacgaggccgactactactgtgccgtgtgggacgactccctgaacggctgggtgttcggcggaggcaccaagctgaccgtgctg

SEQ ID NO: 1124 - protein, 245 aa, artificial
  VH-VL of CDH19 26F12.1
QVQLVQSGAEVKKPGASVKVSCKASRYTFTNYYMSWVRQAPGQGLEWMGIINPSGGDSTYAQKFQGRLTMTGDTSTSTVYMELSSLRSEDTAVYYCARGGIQLWLHFDYWGQGTLVTVSSGGGGSGGGGSGGGGSQSVLTQSPSASGTPGQKVTISCSGSRSNIGSNFVNWYQQLPGTAPKLLIYTNYQRPSGVPDRFSGSKSGTSASLAISGLQSEDEADYYCAVWDDSLNGWVFGGGTKLTVL

SEQ ID NO: 1125 - protein, 506 aa, artificial
  CDH19 26F12.1 x I2C
QVQLVQSGAEVKKPGASVKVSCKASRYTFTNYYMSWVRQAPGQGLEWMGIINPSGGDSTYAQKFQGRLTMTGDTSTSTVYMELSSLRSEDTAVYYCARGGIQLWLHFDYWGQGTLVTVSSGGGGSGGGGSGGGGSQSVLTQSPSASGTPGQKVTISCSGSRSNIGSNFVNWYQQLPGTAPKLLIYTNYQRPSGVPDRFSGSKSGTSASLAISGLQSEDEADYYCAVWDDSLNGWVFGGGTKLTVLSGGGGSEVQLVESGGGLVQPGGSLKLSCAASGFTFNKYAMNWVRQAPGKGLEWVARIRSKYNNYATYYADSVKDRFTISRDDSKNTAYLQMNNLKTEDTAVYYCVRHGNFGNSYISYWAYWGQGTLVTVSSGGGGSGGGGSGGGGSQTVVTQEPSLTVSPGGTVTLTCGSSTGAVTSGNYPNWVQQKPGQAPRGLIGGTKFLAPGTPARFSGSLLGGKAALTLSGVQPEDEAEYYCVLWYSNRWVFGGGTKLTVLHHHHHH

SEQ ID NO: 1126 - protein, 5 aa, artificial
  CDR-H1 of CDH19 4A9
GYYWS

SEQ ID NO: 1127 - protein, 16 aa, artificial
  CDR-H2 of CDH19 4A9
YFSYSGSTNYNPSLKS

SEQ ID NO: 1128 - protein, 8 aa, artificial
  CDR-H3 of CDH19 4A9
NWAFHFDF

SEQ ID NO: 1129 - protein, 14 aa, artificial
  CDR-L1 of CDH19 4A9
TGSSSNIGTGYAVH

SEQ ID NO: 1130 - protein, 7 aa, artificial
  CDR-L2 of CDH19 4A9
GNNNRPS

SEQ ID NO: 1131 - protein, 11 aa, artificial
  CDR-L3 of CDH19 4A9
QSYDSRLSGWV

SEQ ID NO: 1132 - DNA, 348 bp, artificial
  VH of CDH19 4A9
caggtgcagctgcaggaatccggccctggcctggtcaagccctccgagacactgtccctgacctgcaccgtgtccggcggctccatctccggctactactggtcctggatccggcagccccctggcaagggcctggaatggttcgcctacttctcctactccggctccaccaactacaaccccagcctgaagtccagagtgaccctgtccgtggacacctccaagaaccagttctccctgaagctgtcctccgtgaccgccgctgacaccgccgtgtactactgcgcccggaactgggccttccacttcgatttctggggccagggcaccctggtcaccgtgtctagc

SEQ ID NO: 1133 - protein, 116 aa, artificial; identical to SEQ ID NO: 362
  VH of CDH19 4A9

SEQ ID NO: 1134 - DNA, 333 bp, artificial
  VL of CDH19 4A9
cagtctgtgctgacccagcctccctctgtgtctggcgcccctggccagagagtgaccatctcctgcaccggctcctccagcaacatcggcaccggctacgccgtgcactggtatcagcagttccccggcaccgcccccaagctgctgatctacggcaacaacaaccggccctccggcgtgcccgaccggttctctggctccaagtctggcacctccgcctccctggctatcaccggcctgcaggctgaggacgaggccgactactactgccagtcctacgactcccggctgtccggctgggtgttcggcggaggcaccaagctgaccgtgctg

SEQ ID NO: 1135 - protein, 111 aa, artificial
  VL of CDH19 4A9
QSVLTQPPSVSGAPGQRVTISCTGSSSNIGTGYAVHWYQQFPGTAPKLLIYGNNNRPSGVPDRFSGSKSGTSASLAITGLQAEDEADYYCQSYDSRLSGWVFGGGTKLTVL

SEQ ID NO: 1136 - DNA, 726 bp, artificial
  VH-VL of CDH19 4A9
caggtgcagctgcaggaatccggccctggcctggtcaagccctccgagacactgtccctgacctgcaccgtgtccggcggctccatctccggctactactggtcctggatccggcagccccctggcaagggcctggaatggttcgcctacttctcctactccggctccaccaactacaaccccagcctgaagtccagagtgaccctgtccgtggacacctccaagaaccagttctccctgaagctgtcctccgtgaccgccgctgacaccgccgtgtactactgcgcccggaactgggccttccacttcgatttctggggccagggcaccctggtcaccgtgtctagcggaggcggaggatctggtggcggtggttctggcggcggaggctcccagtctgtgctgacccagcctccctctgtgtctggcgcccctggccagagagtgaccatctcctgcaccggctcctccagcaacatcggcaccggctacgccgtgcactggtatcagcagttccccggcaccgcccccaagctgctgatctacggcaacaacaaccggccctccggcgtgcccgaccggttctctggctccaagtctggcacctccgcctccctggctatcaccggcctgcaggctgaggacgaggccgactactactgccagtcctacgactcccggctgtccggctgggtgttcggcggaggcaccaagctgaccgtgctg

SEQ ID NO: 1137 - protein, 242 aa, artificial
  VH-VL of CDH19 4A9
QVQLQESGPGLVKPSETLSLTCTVSGGSISGYYWSWIRQPPGKGLEWFAYFSYSGSTNYNPSLKSRVTLSVDTSKNQFSLKLSSVTAADTAVYYCARNWAFHFDFWGQGTLVTVSSGGGGSGGGGSGGGGSQSVLTQPPSVSGAPGQRVTISCTGSSSNIGTGYAVHWYQQFPGTAPKLLIYGNNNRPSGVPDRFSGSKSGTSASLAITGLQAEDEADYYCQSYDSRLSGWVFGGGTKLTVL

SEQ ID NO: 1138 - protein, 503 aa, artificial
  CDH19 4A9  x I2C
QVQLQESGPGLVKPSETLSLTCTVSGGSISGYYWSWIRQPPGKGLEWFAYFSYSGSTNYNPSLKSRVTLSVDTSKNQFSLKLSSVTAADTAVYYCARNWAFHFDFWGQGTLVTVSSGGGGSGGGGSGGGGSQSVLTQPPSVSGAPGQRVTISCTGSSSNIGTGYAVHWYQQFPGTAPKLLIYGNNNRPSGVPDRFSGSKSGTSASLAITGLQAEDEADYYCQSYDSRLSGWVFGGGTKLTVLSGGGGSEVQLVESGGGLVQPGGSLKLSCAASGFTFNKYAMNWVRQAPGKGLEWVARIRSKYNNYATYYADSVKDRFTISRDDSKNTAYLQMNNLKTEDTAVYYCVRHGNFGNSYISYWAYWGQGTLVTVSSGGGGSGGGGSGGGGSQTVVTQEPSLTVSPGGTVTLTCGSSTGAVTSGNYPNWVQQKPGQAPRGLIGGTKFLAPGTPARFSGSLLGGKAALTLSGVQPEDEAEYYCVLWYSNRWVFGGGTKLTVLHHHHHH

SEQ ID NO: 1139 - protein, 5 aa, artificial
  CDR-H1 of CDH19 4B10
SYDMH

SEQ ID NO: 1140 - protein, 17 aa, artificial
  CDR-H2 of CDH19 4B10
VISYDGTNEYYADSVKG

SEQ ID NO: 1141 - protein, 10 aa, artificial
  CDR-H3 of CDH19 4B10
ERYFDWSFDY

SEQ ID NO: 1142 - protein, 12 aa, artificial
  CDR-L1 of CDH19 4B10
RASQSVSNTYLA

SEQ ID NO: 1143 - protein, 7 aa, artificial
  CDR-L2 of CDH19 4B10
GASSRAT

SEQ ID NO: 1144 - protein, 8 aa, artificial
  CDR-L3 of CDH19 4B10
QQYSNSWT

SEQ ID NO: 1145 - DNA, 357 bp, artificial
  VH of CDH19 4B10
caggtgcagctggtggaatccggcggaggcgtggtgcagcctggccggtccctgagactgtcttgcgccgcctccggcttcaccttctccagctacgacatgcactgggtccgacaggcccctggcaagggcctggaatgggtggccgtgatctcctacgacggcaccaacgagtactacgccgactccgtgaagggccggttcaccatctcccgggacacctccaagaacaccctgtacctgcagatgaactccctgcgggccgaggacaccgccgtgtactactgcgccagagagcggtacttcgactggtccttcgactactggggccagggcaccctggtgtccgtgtctagc

SEQ ID NO: 1146 - protein, 119 aa, artificial; identical to SEQ ID NO: 346
  VH of CDH19 4B10

SEQ ID NO: 1147 - DNA, 321 bp, artificial
  VL of CDH19 4B10
gagatcgtgctgacccagtcccctggcaccctgtccctgagccctggcgagagagccaccctgtcttgccgggcctcccagtccgtgtccaacacctacctggcctggtatcaccagcgccctggccaggcccctcggctgctgatctacggcgcctcttccagagccaccggcatccctgaccggttctccggctctggctctggcaccgacttcgccctgaccatctccagcctggaacccgaggatttcgctgtgtactattgccagcagtactccaactcctggaccttcggacagggcaccaaggtggaaatcaag

SEQ ID NO: 1148 - protein, 107 aa, artificial
  VL of CDH19 4B10
EIVLTQSPGTLSLSPGERATLSCRASQSVSNTYLAWYHQRPGQAPRLLIYGASSRATGIPDRFSGSGSGTDFALTISSLEPEDFAVYYCQQYSNSWTFGQGTKVEIK

SEQ ID NO: 1149 - DNA, 723 bp, artificial
  VH-VL of CDH19 4B10
caggtgcagctggtggaatccggcggaggcgtggtgcagcctggccggtccctgagactgtcttgcgccgcctccggcttcaccttctccagctacgacatgcactgggtccgacaggcccctggcaagggcctggaatgggtggccgtgatctcctacgacggcaccaacgagtactacgccgactccgtgaagggccggttcaccatctcccgggacacctccaagaacaccctgtacctgcagatgaactccctgcgggccgaggacaccgccgtgtactactgcgccagagagcggtacttcgactggtccttcgactactggggccagggcaccctggtgtccgtgtctagcggaggcggaggatctggtggcggtggttctggcggcggaggctccgagatcgtgctgacccagtcccctggcaccctgtccctgagccctggcgagagagccaccctgtcttgccgggcctcccagtccgtgtccaacacctacctggcctggtatcaccagcgccctggccaggcccctcggctgctgatctacggcgcctcttccagagccaccggcatccctgaccggttctccggctctggctctggcaccgacttcgccctgaccatctccagcctggaacccgaggatttcgctgtgtactattgccagcagtactccaactcctggaccttcggacagggcaccaaggtggaaatcaag

SEQ ID NO: 1150 - protein, 241 aa, artificial
  VH-VL of CDH19 4B10
QVQLVESGGGVVQPGRSLRLSCAASGFTFSSYDMHWVRQAPGKGLEWVAVISYDGTNEYYADSVKGRFTISRDTSKNTLYLQMNSLRAEDTAVYYCARERYFDWSFDYWGQGTLVSVSSGGGGSGGGGSGGGGSEIVLTQSPGTLSLSPGERATLSCRASQSVSNTYLAWYHQRPGQAPRLLIYGASSRATGIPDRFSGSGSGTDFALTISSLEPEDFAVYYCQQYSNSWTFGQGTKVEIK

SEQ ID NO: 1151 - protein, 502 aa, artificial
  CDH19 4B10 x I2C
QVQLVESGGGVVQPGRSLRLSCAASGFTFSSYDMHWVRQAPGKGLEWVAVISYDGTNEYYADSVKGRFTISRDTSKNTLYLQMNSLRAEDTAVYYCARERYFDWSFDYWGQGTLVSVSSGGGGSGGGGSGGGGSEIVLTQSPGTLSLSPGERATLSCRASQSVSNTYLAWYHQRPGQAPRLLIYGASSRATGIPDRFSGSGSGTDFALTISSLEPEDFAVYYCQQYSNSWTFGQGTKVEIKSGGGGSEVQLVESGGGLVQPGGSLKLSCAASGFTFNKYAMNWVRQAPGKGLEWVARIRSKYNNYATYYADSVKDRFTISRDDSKNTAYLQMNNLKTEDTAVYYCVRHGNFGNSYISYWAYWGQGTLVTVSSGGGGSGGGGSGGGGSQTVVTQEPSLTVSPGGTVTLTCGSSTGAVTSGNYPNWVQQKPGQAPRGLIGGTKFLAPGTPARFSGSLLGGKAALTLSGVQPEDEAEYYCVLWYSNRWVFGGGTKLTVLHHHHHH

SEQ ID NO: 1152 - protein, 5 aa, artificial
  CDR-H1 of CDH19 4F3
SYDMD

SEQ ID NO: 1153 - protein, 17 aa, artificial
  CDR-H2 of CDH19 4F3
VIWYDGSNKYYADSVRG

SEQ ID NO: 1154 - protein, 10 aa, artificial
  CDR-H3 of CDH19 4F3
ETGEGWYFDL

SEQ ID NO: 1155 - protein, 12 aa, artificial
  CDR-L1 of CDH19 4F3
RASQSVSSSYLA

SEQ ID NO: 1156 - protein, 7 aa, artificial
  CDR-L2 of CDH19 4F3
GASSRAT

SEQ ID NO: 1157 - protein, 8 aa, artificial
  CDR-L3 of CDH19 4F3
QQYGSSWT

SEQ ID NO: 1158 - DNA, 357 bp, artificial
  VH of CDH19 4F3
caggtgcagctggtggaatccggcggaggcgtggtgcagcctggccggtccctgagactgtcttgtgccgcctccggcttcagcttctcctcctacgacatggactgggtccgacagacccccggcaagggcctggaatgggtggccgtgatttggtacgacggctccaacaagtactacgccgactccgtgcggggcagattcaccatctcccgggacaactccaagaacaccctgtttctgcagatgaactccctgcgggtggaagataccgccgtgtactactgcgccagagagacaggcgagggctggtacttcgacctgtggggcagaggcaccctggtcaccgtgtctagc

SEQ ID NO: 1159 - protein, 119 aa, artificial; identical to SEQ ID NO: 348
  VH of CDH19 4F3

SEQ ID NO: 1160 - DNA, 321 bp, artificial
  VL of CDH19 4F3
gagatcgtgctgacccagtcccctggcaccctgtccctgagccctggcgagagagccaccctgtcctgcagagcctcccagtccgtgtcctcctcctacctggcctggtatcagcagaagcccggccaggcccctcggctgctgatctacggcgcctcttccagagccaccggcatccctgaccggttctccggctctggctccggcaccgacttcaccctgaccatcagccggctggaacccgaggacttcgctgtgtactattgccagcagtacggctcctcctggaccttcggccagggcaccaaggtggaaatcaag

SEQ ID NO: 1161 - protein, 107 aa, artificial
  VL of CDH19 4F3
EIVLTQSPGTLSLSPGERATLSCRASQSVSSSYLAWYQQKPGQAPRLLIYGASSRATGIPDRFSGSGSGTDFTLTISRLEPEDFAVYYCQQYGSSWTFGQGTKVEIK

SEQ ID NO: 1162 - DNA, 723 bp, artificial
  VH-VL of CDH19 4F3
caggtgcagctggtggaatccggcggaggcgtggtgcagcctggccggtccctgagactgtcttgtgccgcctccggcttcagcttctcctcctacgacatggactgggtccgacagacccccggcaagggcctggaatgggtggccgtgatttggtacgacggctccaacaagtactacgccgactccgtgcggggcagattcaccatctcccgggacaactccaagaacaccctgtttctgcagatgaactccctgcgggtggaagataccgccgtgtactactgcgccagagagacaggcgagggctggtacttcgacctgtggggcagaggcaccctggtcaccgtgtctagcggaggcggaggatctggtggcggtggttctggcggcggaggctccgagatcgtgctgacccagtcccctggcaccctgtccctgagccctggcgagagagccaccctgtcctgcagagcctcccagtccgtgtcctcctcctacctggcctggtatcagcagaagcccggccaggcccctcggctgctgatctacggcgcctcttccagagccaccggcatccctgaccggttctccggctctggctccggcaccgacttcaccctgaccatcagccggctggaacccgaggacttcgctgtgtactattgccagcagtacggctcctcctggaccttcggccagggcaccaaggtggaaatcaag

SEQ ID NO: 1163 - protein, 241 aa, artificial
  VH-VL of CDH19 4F3
QVQLVESGGGVVQPGRSLRLSCAASGFSFSSYDMDWVRQTPGKGLEWVAVIWYDGSNKYYADSVRGRFTISRDNSKNTLFLQMNSLRVEDTAVYYCARETGEGWYFDLWGRGTLVTVSSGGGGSGGGGSGGGGSEIVLTQSPGTLSLSPGERATLSCRASQSVSSSYLAWYQQKPGQAPRLLIYGASSRATGIPDRFSGSGSGTDFTLTISRLEPEDFAVYYCQQYGSSWTFGQGTKVEIK

SEQ ID NO: 1164 - protein, 502 aa, artificial
  CDH19 4F3 x I2C
QVQLVESGGGVVQPGRSLRLSCAASGFSFSSYDMDWVRQTPGKGLEWVAVIWYDGSNKYYADSVRGRFTISRDNSKNTLFLQMNSLRVEDTAVYYCARETGEGWYFDLWGRGTLVTVSSGGGGSGGGGSGGGGSEIVLTQSPGTLSLSPGERATLSCRASQSVSSSYLAWYQQKPGQAPRLLIYGASSRATGIPDRFSGSGSGTDFTLTISRLEPEDFAVYYCQQYGSSWTFGQGTKVEIKSGGGGSEVQLVESGGGLVQPGGSLKLSCAASGFTFNKYAMNWVRQAPGKGLEWVARIRSKYNNYATYYADSVKDRFTISRDDSKNTAYLQMNNLKTEDTAVYYCVRHGNFGNSYISYWAYWGQGTLVTVSSGGGGSGGGGSGGGGSQTVVTQEPSLTVSPGGTVTLTCGSSTGAVTSGNYPNWVQQKPGQAPRGLIGGTKFLAPGTPARFSGSLLGGKAALTLSGVQPEDEAEYYCVLWYSNRWVFGGGTKLTVLHHHHHH

SEQ ID NO: 1165 - protein, 5 aa, artificial
  CDR-H1 of CDH19 4F7
SYSWS

SEQ ID NO: 1166 - protein, 16 aa, artificial
  CDR-H2 of CDH19 4F7
YIYYSGSTNYNPSLKS

SEQ ID NO: 1167 - protein, 8 aa, artificial
  CDR-H3 of CDH19 4F7
NWAFHFDY

SEQ ID NO: 1168 - protein, 14 aa, artificial
  CDR-L1 of CDH19 4F7
TGSSSNIGTGYDVH

SEQ ID NO: 1169 - protein, 7 aa, artificial
  CDR-L2 of CDH19 4F7
GNSNRPS

SEQ ID NO: 1170 - protein, 11 aa, artificial
  CDR-L3 of CDH19 4F7
QSYDSSLSGWV

SEQ ID NO: 1171 - DNA, 348 bp, artificial
  VH of CDH19 4F7
caggtgcagctgcaggaatccggccctggcctggtcaagccctccgagacactgtccctgacctgcaccgtgtccggcggctccatctcctcctactcttggtcctggatccggcagccccctggcaagggcctggaatggatcggctacatctactactccggctccaccaactacaaccccagcctgaagtccagagtgaccatctccctggacacctccaagaaccagttctccctgaagctgtcctccgtgaccgccgctgacaccgccgtgtactactgcgcccggaactgggccttccacttcgactactggggccagggcaccctggtcaccgtgtctagc

SEQ ID NO: 1172 - protein, 116 aa, artificial; identical to SEQ ID NO: 364
  VH of CDH19 4F7

SEQ ID NO: 1173 - DNA, 333 bp, artificial
  VL of CDH19 4F7
cagtctgtgctgacccagcctccctctgtgtctggcgcccctggccagcgcgtgaccatttcctgcaccggctcctccagcaacatcggcaccggctacgacgtgcactggtatcagcagctgcccggcaccgcccccaagctgctgatccacggcaactccaaccggccctccggcgtgcccgaccggttctctggctccaagtctggcacctccgcctccctggctatcaccggcctgcaggctgaggacgaggccgactactactgccagtcctacgactcctccctgtccggctgggtgttcggcggaggcaccagactgaccgtgctg

SEQ ID NO: 1174 - protein, 111 aa, artificial
  VL of CDH19 4F7
QSVLTQPPSVSGAPGQRVTISCTGSSSNIGTGYDVHWYQQLPGTAPKLLIHGNSNRPSGVPDRFSGSKSGTSASLAITGLQAEDEADYYCQSYDSSLSGWVFGGGTRLTVL

SEQ ID NO: 1175 - DNA, 726 bp, artificial
  VH-VL of CDH19 4F7
caggtgcagctgcaggaatccggccctggcctggtcaagccctccgagacactgtccctgacctgcaccgtgtccggcggctccatctcctcctactcttggtcctggatccggcagccccctggcaagggcctggaatggatcggctacatctactactccggctccaccaactacaaccccagcctgaagtccagagtgaccatctccctggacacctccaagaaccagttctccctgaagctgtcctccgtgaccgccgctgacaccgccgtgtactactgcgcccggaactgggccttccacttcgactactggggccagggcaccctggtcaccgtgtctagcggaggcggaggatctggtggcggtggttctggcggcggaggctcccagtctgtgctgacccagcctccctctgtgtctggcgcccctggccagcgcgtgaccatttcctgcaccggctcctccagcaacatcggcaccggctacgacgtgcactggtatcagcagctgcccggcaccgcccccaagctgctgatccacggcaactccaaccggccctccggcgtgcccgaccggttctctggctccaagtctggcacctccgcctccctggctatcaccggcctgcaggctgaggacgaggccgactactactgccagtcctacgactcctccctgtccggctgggtgttcggcggaggcaccagactgaccgtgctg

SEQ ID NO: 1176 - protein, 242 aa, artificial
  VH-VL of CDH19 4F7
QVQLQESGPGLVKPSETLSLTCTVSGGSISSYSWSWIRQPPGKGLEWIGYIYYSGSTNYNPSLKSRVTISLDTSKNQFSLKLSSVTAADTAVYYCARNWAFHFDYWGQGTLVTVSSGGGGSGGGGSGGGGSQSVLTQPPSVSGAPGQRVTISCTGSSSNIGTGYDVHWYQQLPGTAPKLLIHGNSNRPSGVPDRFSGSKSGTSASLAITGLQAEDEADYYCQSYDSSLSGWVFGGGTRLTVL

SEQ ID NO: 1177 - protein, 503 aa, artificial
  CDH19 4F7 x I2C
QVQLQESGPGLVKPSETLSLTCTVSGGSISSYSWSWIRQPPGKGLEWIGYIYYSGSTNYNPSLKSRVTISLDTSKNQFSLKLSSVTAADTAVYYCARNWAFHFDYWGQGTLVTVSSGGGGSGGGGSGGGGSQSVLTQPPSVSGAPGQRVTISCTGSSSNIGTGYDVHWYQQLPGTAPKLLIHGNSNRPSGVPDRFSGSKSGTSASLAITGLQAEDEADYYCQSYDSSLSGWVFGGGTRLTVLSGGGGSEVQLVESGGGLVQPGGSLKLSCAASGFTFNKYAMNWVRQAPGKGLEWVARIRSKYNNYATYYADSVKDRFTISRDDSKNTAYLQMNNLKTEDTAVYYCVRHGNFGNSYISYWAYWGQGTLVTVSSGGGGSGGGGSGGGGSQTVVTQEPSLTVSPGGTVTLTCGSSTGAVTSGNYPNWVQQKPGQAPRGLIGGTKFLAPGTPARFSGSLLGGKAALTLSGVQPEDEAEYYCVLWYSNRWVFGGGTKLTVLHHHHHH

SEQ ID NO: 1178 - protein, 5 aa, artificial
  CDR-H1 of CDH19 14039
SYGMH

SEQ ID NO: 1179 - protein, 17 aa, artificial
  CDR-H2 of CDH19 14039
FIWYEGSNKYYAESVKD

SEQ ID NO: 1180 - protein, 16 aa, artificial
  CDR-H3 of CDH19 14039
RAGIIGTIGYYYGMDV

SEQ ID NO: 1181 - protein, 11 aa, artificial
  CDR-L1 of CDH19 14039
SGDRLGEKYTS

SEQ ID NO: 1182 - protein, 7 aa, artificial
  CDR-L2 of CDH19 14039
QDTKRPS

SEQ ID NO: 1183 - protein, 9 aa, artificial
  CDR-L3 of CDH19 14039
QAWESSTVV

SEQ ID NO: 1184 - DNA, 375 bp, artificial
  VH of CDH19 14039
caggtgcagttggtggagtctgggggaggcgtggtccagcctggggggtccctgagactctcctgtgcagcgtctggattcaccttcagtagctatggcatgcactgggtccgccaggctccaggcaaggggctggagtgggtggcatttatatggtatgagggaagtaataaatactatgcagagtccgtgaaggaccgattcaccatctccagagacaattccaagaacacgctgtatctgcaaatgaatagcctgagagctgaggacacggctgtgtattactgtgcgagaagggccggtataataggaactataggctactactacggtatggacgtctggggccaagggaccacggtcaccgtctctagt

SEQ ID NO: 1185 - protein, 125 aa, artificial; identical to SEQ ID NO: 475
  VH of CDH19 14039

SEQ ID NO: 1186 - DNA, 318 bp, artificial
  VL of CDH19 14039
tcctatgaactgactcagccaccctcagtgtccgtgtccccaggacagacagccagcatcacctgctctggagataggttgggggaaaaatatactagctggtatcagcagaggccaggccagtcccctttgctggtcatctatcaagataccaagcggccctcagggatccctgagcgattctctggctccaactctggtaacacagccactctgaccatcagcgggacccaggctatggatgaggctgactattactgtcaggcgtgggagagcagcactgtggtattcggcggagggaccaagctgaccgtccta

SEQ ID NO: 1187 - protein, 106 aa, artificial
  VL of CDH19 14039
SYELTQPPSVSVSPGQTASITCSGDRLGEKYTSWYQQRPGQSPLLVIYQDTKRPSGIPERFSGSNSGNTATLTISGTQAMDEADYYCQAWESSTVVFGGGTKLTVL

SEQ ID NO: 1188 - DNA, 738 bp, artificial
  VH-VL of CDH19 14039
caggtgcagttggtggagtctgggggaggcgtggtccagcctggggggtccctgagactctcctgtgcagcgtctggattcaccttcagtagctatggcatgcactgggtccgccaggctccaggcaaggggctggagtgggtggcatttatatggtatgagggaagtaataaatactatgcagagtccgtgaaggaccgattcaccatctccagagacaattccaagaacacgctgtatctgcaaatgaatagcctgagagctgaggacacggctgtgtattactgtgcgagaagggccggtataataggaactataggctactactacggtatggacgtctggggccaagggaccacggtcaccgtctctagtggtggcggaggatctggcggaggtggaagcggaggcggcggatcttcctatgaactgactcagccaccctcagtgtccgtgtccccaggacagacagccagcatcacctgctctggagataggttgggggaaaaatatactagctggtatcagcagaggccaggccagtcccctttgctggtcatctatcaagataccaagcggccctcagggatccctgagcgattctctggctccaactctggtaacacagccactctgaccatcagcgggacccaggctatggatgaggctgactattactgtcaggcgtgggagagcagcactgtggtattcggcggagggaccaagctgaccgtccta

SEQ ID NO: 1189 - protein, 246 aa, artificial
  VH-VL of CDH19 14039
QVQLVESGGGVVQPGGSLRLSCAASGFTFSSYGMHWVRQAPGKGLEWVAFIWYEGSNKYYAESVKDRFTISRDNSKNTLYLQMNSLRAEDTAVYYCARRAGIIGTIGYYYGMDVWGQGTTVTVSSGGGGSGGGGSGGGGSSYELTQPPSVSVSPGQTASITCSGDRLGEKYTSWYQQRPGQSPLLVIYQDTKRPSGIPERFSGSNSGNTATLTISGTQAMDEADYYCQAWESSTVVFGGGTKLTVL

SEQ ID NO: 1190 - protein, 507 aa, artificial
  CDH19 14039 x I2C
QVQLVESGGGVVQPGGSLRLSCAASGFTFSSYGMHWVRQAPGKGLEWVAFIWYEGSNKYYAESVKDRFTISRDNSKNTLYLQMNSLRAEDTAVYYCARRAGIIGTIGYYYGMDVWGQGTTVTVSSGGGGSGGGGSGGGGSSYELTQPPSVSVSPGQTASITCSGDRLGEKYTSWYQQRPGQSPLLVIYQDTKRPSGIPERFSGSNSGNTATLTISGTQAMDEADYYCQAWESSTVVFGGGTKLTVLSGGGGSEVQLVESGGGLVQPGGSLKLSCAASGFTFNKYAMNWVRQAPGKGLEWVARIRSKYNNYATYYADSVKDRFTISRDDSKNTAYLQMNNLKTEDTAVYYCVRHGNFGNSYISYWAYWGQGTLVTVSSGGGGSGGGGSGGGGSQTVVTQEPSLTVSPGGTVTLTCGSSTGAVTSGNYPNWVQQKPGQAPRGLIGGTKFLAPGTPARFSGSLLGGKAALTLSGVQPEDEAEYYCVLWYSNRWVFGGGTKLTVLHHHHHH

SEQ ID NO: 1191 - protein, 5 aa, artificial
  CDR-H1 of CDH19 14304
SYGMH

SEQ ID NO: 1192 - protein, 17 aa, artificial
  CDR-H2 of CDH19 14304
FIWYDGSNKYYADSVKD

SEQ ID NO: 1193 - protein, 16 aa, artificial
  CDR-H3 of CDH19 14304
RAGIIGTIGYYYGMDV

SEQ ID NO: 1194 - protein, 11 aa, artificial
  CDR-L1 of CDH19 14304
SGDRLGEKYVS

SEQ ID NO: 1195 - protein, 7 aa, artificial
  CDR-L2 of CDH19 14304
QDNKWPS

SEQ ID NO: 1196 - protein, 9 aa, artificial
  CDR-L3 of CDH19 14304
QAWDSSTVV

SEQ ID NO: 1197 - DNA, 375 bp, artificial
  VH of CDH19 14304
caggtgcagttggtggagtctgggggaggcgtggtccagcctggggggtccctgagactctcctgtgcagcgtctggattcaccttcagtagctatggcatgcactgggtccgccaggctccaggcaaggggctggagtgggtggcatttatatggtatgatggaagtaataaatactatgcagactccgtgaaggaccgattcaccatctccagagacaattccaagaacacgctgtatctgcaaatgaaaagcctgagagctgaggacacggctgtgtattactgtgcgagaagggccggtataataggaactataggctactactacggtatggacgtctggggccaagggaccacggtcaccgtctctagt

SEQ ID NO: 1198 - protein, 125 aa, artificial; identical to SEQ ID NO: 543
  VH of CDH19 14304

SEQ ID NO: 1199 - DNA, 318 bp, artificial
  VL of CDH19 14304
tcctatgagctgactcagccaccctcagtgtccgtgtccccaggacagacagccagcatcacctgctctggagatagattgggggagaaatatgttagctggtatcagcagaagccaggccagtcccctatactggtcatctatcaagataataagtggccctcagggatccctgagcgattctctggctccaactctgggaacacagccactctgaccatcagcgggacccaggctatggatgaggctgactattactgtcaggcgtgggacagcagcactgtggtattcggcggggggaccaagctgaccgtccta

SEQ ID NO: 1200 - protein, 106 aa, artificial
  VL of CDH19 14304
SYELTQPPSVSVSPGQTASITCSGDRLGEKYVSWYQQKPGQSPILVIYQDNKWPSGIPERFSGSNSGNTATLTISGTQAMDEADYYCQAWDSSTVVFGGGTKLTVL

SEQ ID NO: 1201 - DNA, 738 bp, artificial
  VH-VL of CDH19 14304
caggtgcagttggtggagtctgggggaggcgtggtccagcctggggggtccctgagactctcctgtgcagcgtctggattcaccttcagtagctatggcatgcactgggtccgccaggctccaggcaaggggctggagtgggtggcatttatatggtatgatggaagtaataaatactatgcagactccgtgaaggaccgattcaccatctccagagacaattccaagaacacgctgtatctgcaaatgaaaagcctgagagctgaggacacggctgtgtattactgtgcgagaagggccggtataataggaactataggctactactacggtatggacgtctggggccaagggaccacggtcaccgtctctagtggtggcggaggatctggcggaggtggaagcggaggcggcggatcttcctatgagctgactcagccaccctcagtgtccgtgtccccaggacagacagccagcatcacctgctctggagatagattgggggagaaatatgttagctggtatcagcagaagccaggccagtcccctatactggtcatctatcaagataataagtggccctcagggatccctgagcgattctctggctccaactctgggaacacagccactctgaccatcagcgggacccaggctatggatgaggctgactattactgtcaggcgtgggacagcagcactgtggtattcggcggggggaccaagctgaccgtccta

SEQ ID NO: 1202 - protein, 246 aa, artificial
  VH-VL of CDH19 14304
QVQLVESGGGVVQPGGSLRLSCAASGFTFSSYGMHWVRQAPGKGLEWVAFIWYDGSNKYYADSVKDRFTISRDNSKNTLYLQMKSLRAEDTAVYYCARRAGIIGTIGYYYGMDVWGQGTTVTVSSGGGGSGGGGSGGGGSSYELTQPPSVSVSPGQTASITCSGDRLGEKYVSWYQQKPGQSPILVIYQDNKWPSGIPERFSGSNSGNTATLTISGTQAMDEADYYCQAWDSSTVVFGGGTKLTVL

SEQ ID NO: 1203 - protein, 507 aa, artificial
  CDH19 14304 x I2C
QVQLVESGGGVVQPGGSLRLSCAASGFTFSSYGMHWVRQAPGKGLEWVAFIWYDGSNKYYADSVKDRFTISRDNSKNTLYLQMKSLRAEDTAVYYCARRAGIIGTIGYYYGMDVWGQGTTVTVSSGGGGSGGGGSGGGGSSYELTQPPSVSVSPGQTASITCSGDRLGEKYVSWYQQKPGQSPILVIYQDNKWPSGIPERFSGSNSGNTATLTISGTQAMDEADYYCQAWDSSTVVFGGGTKLTVLSGGGGSEVQLVESGGGLVQPGGSLKLSCAASGFTFNKYAMNWVRQAPGKGLEWVARIRSKYNNYATYYADSVKDRFTISRDDSKNTAYLQMNNLKTEDTAVYYCVRHGNFGNSYISYWAYWGQGTLVTVSSGGGGSGGGGSGGGGSQTVVTQEPSLTVSPGGTVTLTCGSSTGAVTSGNYPNWVQQKPGQAPRGLIGGTKFLAPGTPARFSGSLLGGKAALTLSGVQPEDEAEYYCVLWYSNRWVFGGGTKLTVLHHHHHH

SEQ ID NO: 1204 - protein, 5 aa, artificial
  CDR-H1 of CDH19 14301
SYGMH

SEQ ID NO: 1205 - protein, 17 aa, artificial
  CDR-H2 of CDH19 14301
FIWYDGSNKYYADSVKD

SEQ ID NO: 1206 - protein, 16 aa, artificial
  CDR-H3 of CDH19 14301
RAGIIGTIGYYYGMDV

SEQ ID NO: 1207 - protein, 11 aa, artificial
  CDR-L1 of CDH19 14301
SGDRLGEKYTC

SEQ ID NO: 1208 - protein, 7 aa, artificial
  CDR-L2 of CDH19 14301
QDTKRPS

SEQ ID NO: 1209 - protein, 9 aa, artificial
  CDR-L3 of CDH19 14301
QAWESSTVV

SEQ ID NO: 1210 - DNA, 375 bp, artificial
  VH of CDH19 14301
caggtgcagttggtggagtctgggggaggcgtggtccagcctgggaggtccctgagactctcctgtgcagcgtctggattcaccttcagtagctatggcatgcactgggtccgccaggctccaggcaaggggctggagtgggtggcatttatatggtatgatggaagtaataaatactatgcagactccgtgaaggaccgattcaccatctccagagacaattccaagaacacgctgtatctgcaaatgaaaagcctgagagctgaggacacggctgtgtattactgtgcgagaagggccggtataataggaactataggctactactacggtatggacgtctggggccaagggaccacggtcaccgtctctagt

SEQ ID NO: 1211 - protein, 125 aa, artificial; identical to SEQ ID NO: 384
  VH of CDH19 14301

SEQ ID NO: 1212 - DNA, 318 bp, artificial
  VL of CDH19 14301
tcctatgaactgactcagccaccctcagtgtccgtgtccccaggacagacagccagcatcacctgctctggagataggttgggggaaaaatatacttgctggtatcagcagaggccaggccagtcccctttgctggtcatctatcaagataccaagcggccctcagggatccctgagcgattctctggctccaactctggtaacacagccactctgaccatcagcgggacccaggctatggatgaggctgactattactgtcaggcgtgggagagcagcactgtggtattcggcggagggaccaagctgaccgtccta

SEQ ID NO: 1213 - protein, 106 aa, artificial
  VL of CDH19 14301
SYELTQPPSVSVSPGQTASITCSGDRLGEKYTCWYQQRPGQSPLLVIYQDTKRPSGIPERFSGSNSGNTATLTISGTQAMDEADYYCQAWESSTVVFGGGTKLTVL

SEQ ID NO: 1214 - DNA, 738 bp, artificial
  VH-VL of CDH19 14301
caggtgcagttggtggagtctgggggaggcgtggtccagcctgggaggtccctgagactctcctgtgcagcgtctggattcaccttcagtagctatggcatgcactgggtccgccaggctccaggcaaggggctggagtgggtggcatttatatggtatgatggaagtaataaatactatgcagactccgtgaaggaccgattcaccatctccagagacaattccaagaacacgctgtatctgcaaatgaaaagcctgagagctgaggacacggctgtgtattactgtgcgagaagggccggtataataggaactataggctactactacggtatggacgtctggggccaagggaccacggtcaccgtctctagtggtggcggaggatctggcggaggtggaagcggaggcggcggatcttcctatgaactgactcagccaccctcagtgtccgtgtccccaggacagacagccagcatcacctgctctggagataggttgggggaaaaatatacttgctggtatcagcagaggccaggccagtcccctttgctggtcatctatcaagataccaagcggccctcagggatccctgagcgattctctggctccaactctggtaacacagccactctgaccatcagcgggacccaggctatggatgaggctgactattactgtcaggcgtgggagagcagcactgtggtattcggcggagggaccaagctgaccgtccta

SEQ ID NO: 1215 - protein, 246 aa, artificial
  VH-VL of CDH19 14301
QVQLVESGGGVVQPGRSLRLSCAASGFTFSSYGMHWVRQAPGKGLEWVAFIWYDGSNKYYADSVKDRFTISRDNSKNTLYLQMKSLRAEDTAVYYCARRAGIIGTIGYYYGMDVWGQGTTVTVSSGGGGSGGGGSGGGGSSYELTQPPSVSVSPGQTASITCSGDRLGEKYTCWYQQRPGQSPLLVIYQDTKRPSGIPERFSGSNSGNTATLTISGTQAMDEADYYCQAWESSTVVFGGGTKLTVL

SEQ ID NO: 1216 - protein, 507 aa, artificial
  CDH19 14301 x I2C
QVQLVESGGGVVQPGRSLRLSCAASGFTFSSYGMHWVRQAPGKGLEWVAFIWYDGSNKYYADSVKDRFTISRDNSKNTLYLQMKSLRAEDTAVYYCARRAGIIGTIGYYYGMDVWGQGTTVTVSSGGGGSGGGGSGGGGSSYELTQPPSVSVSPGQTASITCSGDRLGEKYTCWYQQRPGQSPLLVIYQDTKRPSGIPERFSGSNSGNTATLTISGTQAMDEADYYCQAWESSTVVFGGGTKLTVLSGGGGSEVQLVESGGGLVQPGGSLKLSCAASGFTFNKYAMNWVRQAPGKGLEWVARIRSKYNNYATYYADSVKDRFTISRDDSKNTAYLQMNNLKTEDTAVYYCVRHGNFGNSYISYWAYWGQGTLVTVSSGGGGSGGGGSGGGGSQTVVTQEPSLTVSPGGTVTLTCGSSTGAVTSGNYPNWVQQKPGQAPRGLIGGTKFLAPGTPARFSGSLLGGKAALTLSGVQPEDEAEYYCVLWYSNRWVFGGGTKLTVLHHHHHH

SEQ ID NO: 1217 - protein, 5 aa, artificial
  CDR-H1 of CDH19 14079
RYGIH

SEQ ID NO: 1218 - protein, 17 aa, artificial
  CDR-H2 of CDH19 14079
VIWYEGSNKYYAESVKG

SEQ ID NO: 1219 - protein, 16 aa, artificial
  CDR-H3 of CDH19 14079
RAGIPGTTGYYYGMDV

SEQ ID NO: 1220 - protein, 11 aa, artificial
  CDR-L1 of CDH19 14079
SGDRLGEKYVS

SEQ ID NO: 1221 - protein, 7 aa, artificial
  CDR-L2 of CDH19 14079
QDNKWPS

SEQ ID NO: 1222 - protein, 9 aa, artificial
  CDR-L3 of CDH19 14079
QAWESSTVV

SEQ ID NO: 1223 - DNA, 375 bp, artificial
  VH of CDH19 14079
caggtgcagctggtggagtctgggggaggcgtggtccagcctggggggtccctgagactctcctgtgcagcgtctggattcaccttcagtcgctatggcatacactgggtccgccaggctccaggcaaggggctggagtgggtggcagttatatggtatgagggaagtaataaatactatgcagagtccgtgaagggccgattcaccatctccagagacaattccaagaacacgctgtatctgcaaatgaacagcctgagagccgaggactcggctgtgtattactgtgcgagaagggccggtatacctggaactacgggctactactatggtatggacgtctggggccaagggaccacggtcaccgtctcctca

SEQ ID NO: 1224 - protein, 125 aa, artificial; identical to SEQ ID NO: 515
  VH of CDH19 14079

SEQ ID NO: 1225 - DNA, 318 bp, artificial
  VL of CDH19 14079
tcctatgagctgactcagccaccctcagtgtccgtgtccccaggacagacagccagcatcacctgctctggagatagattgggggagaaatatgttagctggtatcagcagaagccaggccagtcccctatactggtcatctatcaagataataagtggccctcagggatccctgagcgattctctggctccaactctgggaacacagccactctgaccatcagcgggacccaggctatggatgaggctgactattactgtcaggcgtgggagagcagcactgtggtattcggcggggggaccaagctgaccgtccta

SEQ ID NO: 1226 - protein, 106 aa, artificial
  VL of CDH19 14079
SYELTQPPSVSVSPGQTASITCSGDRLGEKYVSWYQQKPGQSPILVIYQDNKWPSGIPERFSGSNSGNTATLTISGTQAMDEADYYCQAWESSTVVFGGGTKLTVL

SEQ ID NO: 1227 - DNA, 738 bp, artificial
  VH-VL of CDH19 14079
caggtgcagctggtggagtctgggggaggcgtggtccagcctggggggtccctgagactctcctgtgcagcgtctggattcaccttcagtcgctatggcatacactgggtccgccaggctccaggcaaggggctggagtgggtggcagttatatggtatgagggaagtaataaatactatgcagagtccgtgaagggccgattcaccatctccagagacaattccaagaacacgctgtatctgcaaatgaacagcctgagagccgaggactcggctgtgtattactgtgcgagaagggccggtatacctggaactacgggctactactatggtatggacgtctggggccaagggaccacggtcaccgtctcctcaggtggcggaggatctggcggaggtggaagcggaggcggcggatcttcctatgagctgactcagccaccctcagtgtccgtgtccccaggacagacagccagcatcacctgctctggagatagattgggggagaaatatgttagctggtatcagcagaagccaggccagtcccctatactggtcatctatcaagataataagtggccctcagggatccctgagcgattctctggctccaactctgggaacacagccactctgaccatcagcgggacccaggctatggatgaggctgactattactgtcaggcgtgggagagcagcactgtggtattcggcggggggaccaagctgaccgtccta

SEQ ID NO: 1228 - protein, 246 aa, artificial
  VH-VL of CDH19 14079
QVQLVESGGGVVQPGGSLRLSCAASGFTFSRYGIHWVRQAPGKGLEWVAVIWYEGSNKYYAESVKGRFTISRDNSKNTLYLQMNSLRAEDSAVYYCARRAGIPGTTGYYYGMDVWGQGTTVTVSSGGGGSGGGGSGGGGSSYELTQPPSVSVSPGQTASITCSGDRLGEKYVSWYQQKPGQSPILVIYQDNKWPSGIPERFSGSNSGNTATLTISGTQAMDEADYYCQAWESSTVVFGGGTKLTVL

SEQ ID NO: 1229 - protein, 507 aa, artificial
  CDH19 14079 x I2C
QVQLVESGGGVVQPGGSLRLSCAASGFTFSRYGIHWVRQAPGKGLEWVAVIWYEGSNKYYAESVKGRFTISRDNSKNTLYLQMNSLRAEDSAVYYCARRAGIPGTTGYYYGMDVWGQGTTVTVSSGGGGSGGGGSGGGGSSYELTQPPSVSVSPGQTASITCSGDRLGEKYVSWYQQKPGQSPILVIYQDNKWPSGIPERFSGSNSGNTATLTISGTQAMDEADYYCQAWESSTVVFGGGTKLTVLSGGGGSEVQLVESGGGLVQPGGSLKLSCAASGFTFNKYAMNWVRQAPGKGLEWVARIRSKYNNYATYYADSVKDRFTISRDDSKNTAYLQMNNLKTEDTAVYYCVRHGNFGNSYISYWAYWGQGTLVTVSSGGGGSGGGGSGGGGSQTVVTQEPSLTVSPGGTVTLTCGSSTGAVTSGNYPNWVQQKPGQAPRGLIGGTKFLAPGTPARFSGSLLGGKAALTLSGVQPEDEAEYYCVLWYSNRWVFGGGTKLTVLHHHHHH

SEQ ID NO: 1230 - protein, 5 aa, artificial
  CDR-H1 of CDH19  14077
RYGIH

SEQ ID NO: 1231 - protein, 17 aa, artificial
  CDR-H2 of CDH19 14077
VIWYDGSNKYYADSVKG

SEQ ID NO: 1232 - protein, 16 aa, artificial
  CDR-H3 of CDH19 14077
RAGIPGTTGYYYGMDV

SEQ ID NO: 1233 - protein, 11 aa, artificial
  CDR-L1 of CDH19 14077
SGDRLGEKYVS

SEQ ID NO: 1234 - protein, 7 aa, artificial
  CDR-L2 of CDH19 14077
QDNKWPS

SEQ ID NO: 1235 - protein, 9 aa, artificial
  CDR-L3 of CDH19 14077
QAWDSSTVV

SEQ ID NO: 1236 - DNA, 375 bp, artificial
  VH of CDH19 14077
caggtgcagctggtggagtctgggggaggcgtggtccagcctgggaggtccctgagactctcctgtgcagcgtctggattcaccttcagtcgctatggcatacactgggtccgccaggctccaggcaaggggctggagtgggtggcagttatatggtatgatggaagtaataaatactatgcagactccgtgaagggccgattcaccatctccagagacaattccaagaacacgctgtatctgcaaatgaacagcctgagagccgaggactcggctgtgtattactgtgcgagaagggccggtatacctggaactacgggctactactatggtatggacgtctggggccaagggaccacggtcaccgtctcctca

SEQ ID NO: 1237 - protein, 125 aa, artificial; identical to SEQ ID NO: 513
  VH of CDH19 14077

SEQ ID NO: 1238 - DNA, 318 bp, artificial; identical to SEQ ID NO: 1199
  VL of CDH19 14077

SEQ ID NO: 1239 - protein, 106 aa, artificial; identical to SEQ ID NO: 1200
  VL of CDH19 14077

SEQ ID NO: 1240 - DNA, 738 bp, artificial
  VH-VL of CDH19 14077
caggtgcagctggtggagtctgggggaggcgtggtccagcctgggaggtccctgagactctcctgtgcagcgtctggattcaccttcagtcgctatggcatacactgggtccgccaggctccaggcaaggggctggagtgggtggcagttatatggtatgatggaagtaataaatactatgcagactccgtgaagggccgattcaccatctccagagacaattccaagaacacgctgtatctgcaaatgaacagcctgagagccgaggactcggctgtgtattactgtgcgagaagggccggtatacctggaactacgggctactactatggtatggacgtctggggccaagggaccacggtcaccgtctcctcaggtggcggaggatctggcggaggtggaagcggaggcggcggatcttcctatgagctgactcagccaccctcagtgtccgtgtccccaggacagacagccagcatcacctgctctggagatagattgggggagaaatatgttagctggtatcagcagaagccaggccagtcccctatactggtcatctatcaagataataagtggccctcagggatccctgagcgattctctggctccaactctgggaacacagccactctgaccatcagcgggacccaggctatggatgaggctgactattactgtcaggcgtgggacagcagcactgtggtattcggcggggggaccaagctgaccgtccta

SEQ ID NO: 1241 - protein, 246 aa, artificial
  VH-VL of CDH19 14077
QVQLVESGGGVVQPGRSLRLSCAASGFTFSRYGIHWVRQAPGKGLEWVAVIWYDGSNKYYADSVKGRFTISRDNSKNTLYLQMNSLRAEDSAVYYCARRAGIPGTTGYYYGMDVWGQGTTVTVSSGGGGSGGGGSGGGGSSYELTQPPSVSVSPGQTASITCSGDRLGEKYVSWYQQKPGQSPILVIYQDNKWPSGIPERFSGSNSGNTATLTISGTQAMDEADYYCQAWDSSTVVFGGGTKLTVL

SEQ ID NO: 1242 - protein, 507 aa, artificial
  CDH19 14077 x I2C
QVQLVESGGGVVQPGRSLRLSCAASGFTFSRYGIHWVRQAPGKGLEWVAVIWYDGSNKYYADSVKGRFTISRDNSKNTLYLQMNSLRAEDSAVYYCARRAGIPGTTGYYYGMDVWGQGTTVTVSSGGGGSGGGGSGGGGSSYELTQPPSVSVSPGQTASITCSGDRLGEKYVSWYQQKPGQSPILVIYQDNKWPSGIPERFSGSNSGNTATLTISGTQAMDEADYYCQAWDSSTVVFGGGTKLTVLSGGGGSEVQLVESGGGLVQPGGSLKLSCAASGFTFNKYAMNWVRQAPGKGLEWVARIRSKYNNYATYYADSVKDRFTISRDDSKNTAYLQMNNLKTEDTAVYYCVRHGNFGNSYISYWAYWGQGTLVTVSSGGGGSGGGGSGGGGSQTVVTQEPSLTVSPGGTVTLTCGSSTGAVTSGNYPNWVQQKPGQAPRGLIGGTKFLAPGTPARFSGSLLGGKAALTLSGVQPEDEAEYYCVLWYSNRWVFGGGTKLTVLHHHHHH

SEQ ID NO: 1243 - protein, 5 aa, artificial
  CDR-H1 of CDH19 14096
SYYIH

SEQ ID NO: 1244 - protein, 17 aa, artificial
  CDR-H2 of CDH19 14096
IINPSGGSTRYAQKFQG

SEQ ID NO: 1245 - protein, 11 aa, artificial
  CDR-H3 of CDH19 14096
GGIQLWLHFDY

SEQ ID NO: 1246 - protein, 13 aa, artificial
  CDR-L1 of CDH19 14096
SGSSSNIGRNFVN

SEQ ID NO: 1247 - protein, 7 aa, artificial
  CDR-L2 of CDH19 14096
TNNQRPS

SEQ ID NO: 1248 - protein, 11 aa, artificial
  CDR-L3 of CDH19 14096
AAWDESLNGWV

SEQ ID NO: 1249 - DNA, 360 bp, artificial
  VH of CDH19 14096
caggtgcagctggtgcagtctggggctgaggtgaagaagcctggggcctcagtgaaggtttcctgcaaggcatctggatacaccttcaccagctactatattcactgggtgcgccaggcccctggacaaggacttgagtggatgggaataatcaaccccagtggtggtagcacaaggtacgcacagaagttccagggcagagtcaccatgaccagggacacgtccacgagcacagtctacatggagctgagcagcctgagatctgaggacacggccgtgtattactgtgcgcgagggggaatacagctatggttacattttgactactggggccagggaaccctggtcaccgtctcctca

SEQ ID NO: 1250 - protein, 120 aa, artificial; identical to SEQ ID NO: 531
  VH of CDH19 14096

SEQ ID NO: 1251 - DNA, 330 bp, artificial
  VL of CDH19 14096
cagtctgcgctgactcagccaccctcagcgactgggacccccgggcagagggtcaccatctcttgttctggaagcagctccaacatcggaaggaattttgtaaactggtatcagcagctcccaggaacggcccccaaagtcctcatttatactaataatcagcggccctcaggggtccctgaccgattctctggctccaagtctggcacctcagcctccctggccatcagtgggctccagtctgaggatgaggctgattattactgtgcagcatgggatgagagcctgaatggttgggtgttcggcggagggaccaagctgaccgtccta

SEQ ID NO: 1252 - protein, 110 aa, artificial
  VL of CDH19 14096
QSALTQPPSATGTPGQRVTISCSGSSSNIGRNFVNWYQQLPGTAPKVLIYTNNQRPSGVPDRFSGSKSGTSASLAISGLQSEDEADYYCAAWDESLNGWVFGGGTKLTVL

SEQ ID NO: 1253 - DNA, 735 bp, artificial
  VH-VL of CDH19 14096
caggtgcagctggtgcagtctggggctgaggtgaagaagcctggggcctcagtgaaggtttcctgcaaggcatctggatacaccttcaccagctactatattcactgggtgcgccaggcccctggacaaggacttgagtggatgggaataatcaaccccagtggtggtagcacaaggtacgcacagaagttccagggcagagtcaccatgaccagggacacgtccacgagcacagtctacatggagctgagcagcctgagatctgaggacacggccgtgtattactgtgcgcgagggggaatacagctatggttacattttgactactggggccagggaaccctggtcaccgtctcctcaggtggcggaggatctggcggaggtggaagcggaggcggcggatctcagtctgcgctgactcagccaccctcagcgactgggacccccgggcagagggtcaccatctcttgttctggaagcagctccaacatcggaaggaattttgtaaactggtatcagcagctcccaggaacggcccccaaagtcctcatttatactaataatcagcggccctcaggggtccctgaccgattctctggctccaagtctggcacctcagcctccctggccatcagtgggctccagtctgaggatgaggctgattattactgtgcagcatgggatgagagcctgaatggttgggtgttcggcggagggaccaagctgaccgtccta

SEQ ID NO: 1254 - protein, 245 aa, artificial
  VH-VL of CDH19 14096
QVQLVQSGAEVKKPGASVKVSCKASGYTFTSYYIHWVRQAPGQGLEWMGIINPSGGSTRYAQKFQGRVTMTRDTSTSTVYMELSSLRSEDTAVYYCARGGIQLWLHFDYWGQGTLVTVSSGGGGSGGGGSGGGGSQSALTQPPSATGTPGQRVTISCSGSSSNIGRNFVNWYQQLPGTAPKVLIYTNNQRPSGVPDRFSGSKSGTSASLAISGLQSEDEADYYCAAWDESLNGWVFGGGTKLTVL

SEQ ID NO: 1255 - protein, 506 aa, artificial
  CDH19 14096 x I2C
QVQLVQSGAEVKKPGASVKVSCKASGYTFTSYYIHWVRQAPGQGLEWMGIINPSGGSTRYAQKFQGRVTMTRDTSTSTVYMELSSLRSEDTAVYYCARGGIQLWLHFDYWGQGTLVTVSSGGGGSGGGGSGGGGSQSALTQPPSATGTPGQRVTISCSGSSSNIGRNFVNWYQQLPGTAPKVLIYTNNQRPSGVPDRFSGSKSGTSASLAISGLQSEDEADYYCAAWDESLNGWVFGGGTKLTVLSGGGGSEVQLVESGGGLVQPGGSLKLSCAASGFTFNKYAMNWVRQAPGKGLEWVARIRSKYNNYATYYADSVKDRFTISRDDSKNTAYLQMNNLKTEDTAVYYCVRHGNFGNSYISYWAYWGQGTLVTVSSGGGGSGGGGSGGGGSQTVVTQEPSLTVSPGGTVTLTCGSSTGAVTSGNYPNWVQQKPGQAPRGLIGGTKFLAPGTPARFSGSLLGGKAALTLSGVQPEDEAEYYCVLWYSNRWVFGGGTKLTVLHHHHHH

SEQ ID NO: 1256 - protein, 5 aa, artificial
  CDR-H1 of CDH19 14088
SYYMS

SEQ ID NO: 1257 - protein, 17 aa, artificial
  CDR-H2 of CDH19 14088
IIHPSGGDTTYAQKFQG

SEQ ID NO: 1258 - protein, 11 aa, artificial
  CDR-H3 of CDH19 14088
GGIKLWLHFDY

SEQ ID NO: 1259 - protein, 13 aa, artificial
  CDR-L1 of CDH19 14088
SGSRSNIGSNFVN

SEQ ID NO: 1260 - protein, 7 aa, artificial
  CDR-L2 of CDH19 14088
TNNQRPS

SEQ ID NO: 1261 - protein, 11 aa, artificial
  CDR-L3 of CDH19 14088
AVWDDSLNGWV

SEQ ID NO: 1262 - DNA, 360 bp, artificial
  VH of CDH19 14088
caggtgcagttggtgcagtctggggctgaggtgaagaagcctggggcctcagtgaaggtttcctgtaaggcatctggatacaccttcaccagctactatatgtcctgggtgcgacaggcccctggacaagggcttgagtggatgggaataatccaccctagtggtggtgacacaacctacgcacagaagttccagggcagagtcaccatgaccagggacacgtccacgagcacagtctacatggagctgagcagcctgagatctgaggacacggccgtgtattactgtgcgagaggggggataaaactatggttacattttgactattggggccagggaaccctggtcaccgtctcctca

SEQ ID NO: 1263 - protein, 120 aa, artificial; identical to SEQ ID NO: 524
  VH of CDH19 14088

SEQ ID NO: 1264 - DNA, 330 bp, artificial
  VL of CDH19 14088
cagtctgtgctgactcagccaccctcagcgtctgggacccccggacagagggtcaccatctcttgttctggaagccgctccaacatcggaagtaattttgtaaactggtaccagcagctcccaggaacggcccccaaactcctcatctatactaataatcagcggccctcaggggtccctgaccgattctctggctccaagtctggcacctcagcctccctggccatcagtgggctccagtctgaggatgaggctgattattactgtgcagtatgggatgacagcctgaatggttgggtgttcggcggagggaccaagctgaccgtccta

SEQ ID NO: 1265 - protein, 110 aa, artificial
  VL of CDH19 14088
QSVLTQPPSASGTPGQRVTISCSGSRSNIGSNFVNWYQQLPGTAPKLLIYTNNQRPSGVPDRFSGSKSGTSASLAISGLQSEDEADYYCAVWDDSLNGWVFGGGTKLTVL

SEQ ID NO: 1266 - DNA, 735 bp, artificial
  VH-VL of CDH19 14088
caggtgcagttggtgcagtctggggctgaggtgaagaagcctggggcctcagtgaaggtttcctgtaaggcatctggatacaccttcaccagctactatatgtcctgggtgcgacaggcccctggacaagggcttgagtggatgggaataatccaccctagtggtggtgacacaacctacgcacagaagttccagggcagagtcaccatgaccagggacacgtccacgagcacagtctacatggagctgagcagcctgagatctgaggacacggccgtgtattactgtgcgagaggggggataaaactatggttacattttgactattggggccagggaaccctggtcaccgtctcctcaggtggcggaggatctggcggaggtggaagcggaggcggcggatctcagtctgtgctgactcagccaccctcagcgtctgggacccccggacagagggtcaccatctcttgttctggaagccgctccaacatcggaagtaattttgtaaactggtaccagcagctcccaggaacggcccccaaactcctcatctatactaataatcagcggccctcaggggtccctgaccgattctctggctccaagtctggcacctcagcctccctggccatcagtgggctccagtctgaggatgaggctgattattactgtgcagtatgggatgacagcctgaatggttgggtgttcggcggagggaccaagctgaccgtccta

SEQ ID NO: 1267 - protein, 245 aa, artificial
  VH-VL of CDH19 14088
QVQLVQSGAEVKKPGASVKVSCKASGYTFTSYYMSWVRQAPGQGLEWMGIIHPSGGDTTYAQKFQGRVTMTRDTSTSTVYMELSSLRSEDTAVYYCARGGIKLWLHFDYWGQGTLVTVSSGGGGSGGGGSGGGGSQSVLTQPPSASGTPGQRVTISCSGSRSNIGSNFVNWYQQLPGTAPKLLIYTNNQRPSGVPDRFSGSKSGTSASLAISGLQSEDEADYYCAVWDDSLNGWVFGGGTKLTVL

SEQ ID NO: 1268 - protein, 506 aa, artificial
  CDH19 14088 x I2C
QVQLVQSGAEVKKPGASVKVSCKASGYTFTSYYMSWVRQAPGQGLEWMGIIHPSGGDTTYAQKFQGRVTMTRDTSTSTVYMELSSLRSEDTAVYYCARGGIKLWLHFDYWGQGTLVTVSSGGGGSGGGGSGGGGSQSVLTQPPSASGTPGQRVTISCSGSRSNIGSNFVNWYQQLPGTAPKLLIYTNNQRPSGVPDRFSGSKSGTSASLAISGLQSEDEADYYCAVWDDSLNGWVFGGGTKLTVLSGGGGSEVQLVESGGGLVQPGGSLKLSCAASGFTFNKYAMNWVRQAPGKGLEWVARIRSKYNNYATYYADSVKDRFTISRDDSKNTAYLQMNNLKTEDTAVYYCVRHGNFGNSYISYWAYWGQGTLVTVSSGGGGSGGGGSGGGGSQTVVTQEPSLTVSPGGTVTLTCGSSTGAVTSGNYPNWVQQKPGQAPRGLIGGTKFLAPGTPARFSGSLLGGKAALTLSGVQPEDEAEYYCVLWYSNRWVFGGGTKLTVLHHHHHH

SEQ ID NO: 1269 - protein, 5 aa, artificial
  CDR-H1 of CDH19 14085
SYYMS

SEQ ID NO: 1270 - protein, 17 aa, artificial
  CDR-H2 of CDH19 14085
IIHPSGGDTTYAQKFQG

SEQ ID NO: 1271 - protein, 11 aa, artificial
  CDR-H3 of CDH19 14085
GGIKLWLHFDY

SEQ ID NO: 1272 - protein, 13 aa, artificial
  CDR-L1 of CDH19 14085
SGSRSNIGSNFVN

SEQ ID NO: 1273 - protein, 7 aa, artificial
  CDR-L2 of CDH19 14085
TNNQRPS

SEQ ID NO: 1274 - protein, 11 aa, artificial
  CDR-L3 of CDH19 14085
AVYDDSLNGWV

SEQ ID NO: 1275 - DNA, 360 bp, artificial; identical to SEQ ID NO: 371
  VH of CDH19 14085

SEQ ID NO: 1276 - protein, 120 aa, artificial; identical to SEQ ID NO: 372
  VH of CDH19 14085

SEQ ID NO: 1277 - DNA, 330 bp, artificial
  VL of CDH19 14085
cagtctgtgctgactcagccaccctcagcgtctgggacccccggacagagggtcaccatctcttgttctggaagccgctccaacatcggaagtaattttgtaaactggtaccagcagctcccaggaacggcccccaaactcctcatctatactaataatcagcggccctcaggggtccctgaccgattctctggctccaagtctggcacctcagcctccctggccatcagtgggctccagtctgaggatgaggctgattattactgtgcagtatacgatgacagcctgaatggttgggtgttcggcggagggaccaagctgaccgtccta

SEQ ID NO: 1278 - protein, 110 aa, artificial
  VL of CDH19 14085
QSVLTQPPSASGTPGQRVTISCSGSRSNIGSNFVNWYQQLPGTAPKLLIYTNNQRPSGVPDRFSGSKSGTSASLAISGLQSEDEADYYCAVYDDSLNGWVFGGGTKLTVL

SEQ ID NO: 1279 - protein, 735 aa, artificial
  VH-VL of CDH19 14085
CAGGTGCAGTTGGTGCAGTCTGGGGCTGAGGTGAAGAAGCCTGGGGCCTCAGTGAAGGTTTCCTGTAAGGCATCTAGATACACCTTCACCAGCTACTATATGTCCTGGGTGCGACAGGCCCCTGGACAAGGGCTTGAGTGGATGGGAATAATCCACCCTAGTGGTGGTGACACAACCTACGCACAGAAGTTCCAGGGCAGAGTCACCATGACCGGGGACACGTCCACGAGCACAGTCTACATGGAGCTGAGCAGCCTGAGATCTGAGGACACGGCCGTGTATTACTGTGCGAGAGGGGGGATAAAACTATGGTTACATTTTGACTATTGGGGCCAGGGAACCCTGGTCACCGTCTCCTCAGGTGGCGGAGGATCTGGCGGAGGTGGAAGCGGAGGCGGCGGATCTCAGTCTGTGCTGACTCAGCCACCCTCAGCGTCTGGGACCCCCGGACAGAGGGTCACCATCTCTTGTTCTGGAAGCCGCTCCAACATCGGAAGTAATTTTGTAAACTGGTACCAGCAGCTCCCAGGAACGGCCCCCAAACTCCTCATCTATACTAATAATCAGCGGCCCTCAGGGGTCCCTGACCGATTCTCTGGCTCCAAGTCTGGCACCTCAGCCTCCCTGGCCATCAGTGGGCTCCAGTCTGAGGATGAGGCTGATTATTACTGTGCAGTATACGATGACAGCCTGAATGGTTGGGTGTTCGGCGGAGGGACCAAGCTGACCGTCCTA

SEQ ID NO: 1280 - protein, 245 aa, artificial
  VH-VL of CDH19 14085
QVQLVQSGAEVKKPGASVKVSCKASRYTFTSYYMSWVRQAPGQGLEWMGIIHPSGGDTTYAQKFQGRVTMTGDTSTSTVYMELSSLRSEDTAVYYCARGGIKLWLHFDYWGQGTLVTVSSGGGGSGGGGSGGGGSQSVLTQPPSASGTPGQRVTISCSGSRSNIGSNFVNWYQQLPGTAPKLLIYTNNQRPSGVPDRFSGSKSGTSASLAISGLQSEDEADYYCAVYDDSLNGWVFGGGTKLTVL

SEQ ID NO: 1281 - protein, 506 aa, artificial
  CDH19 14085 x I2C
QVQLVQSGAEVKKPGASVKVSCKASRYTFTSYYMSWVRQAPGQGLEWMGIIHPSGGDTTYAQKFQGRVTMTGDTSTSTVYMELSSLRSEDTAVYYCARGGIKLWLHFDYWGQGTLVTVSSGGGGSGGGGSGGGGSQSVLTQPPSASGTPGQRVTISCSGSRSNIGSNFVNWYQQLPGTAPKLLIYTNNQRPSGVPDRFSGSKSGTSASLAISGLQSEDEADYYCAVYDDSLNGWVFGGGTKLTVLSGGGGSEVQLVESGGGLVQPGGSLKLSCAASGFTFNKYAMNWVRQAPGKGLEWVARIRSKYNNYATYYADSVKDRFTISRDDSKNTAYLQMNNLKTEDTAVYYCVRHGNFGNSYISYWAYWGQGTLVTVSSGGGGSGGGGSGGGGSQTVVTQEPSLTVSPGGTVTLTCGSSTGAVTSGNYPNWVQQKPGQAPRGLIGGTKFLAPGTPARFSGSLLGGKAALTLSGVQPEDEAEYYCVLWYSNRWVFGGGTKLTVLHHHHHH

SEQ ID NO: 1282 - protein, 5 aa, artificial
  CDR-H1 of CDH19 14074
SYFIH

SEQ ID NO: 1283 - protein, 17 aa, artificial
  CDR-H2 of CDH19 14074
IINPISVSTSYAQKFQG

SEQ ID NO: 1284 - protein, 11 aa, artificial
  CDR-H3 of CDH19 14074
GGIQLWLHLDY

SEQ ID NO: 1285 - protein, 13 aa, artificial
  CDR-L1 of CDH19 14074
SGSRSNIGSNFVN

SEQ ID NO: 1286 - protein, 7 aa, artificial
  CDR-L2 of CDH19 14074
TNNQRPS

SEQ ID NO: 1287 - protein, 11 aa, artificial
  CDR-L3 of CDH19 14074
ATWDDSMNGWV

SEQ ID NO: 1288 - DNA, 360 bp, artificial; identical to SEQ ID NO: 367
  VH of CDH19 14074

SEQ ID NO: 1289 - protein, 120 aa, artificial; identical to SEQ ID NO: 368
  VH of CDH19 14074

SEQ ID NO: 1290 - DNA, 330 bp, artificial
  VL of CDH19 14074
cagtctgcgctgactcagccaccctcagtgactgggacccccgggcagagggtcaccatctcttgttctggaagcaggtccaacatcggaagcaattttgtaaactggtaccagcagctcccaggaacggcccccaaagtcctcatctatactaataatcagcggccctcaggggtccctgaccgattctctggctccaagtctggcacctcagcctccctggccatcagtgggctccagtctgaggatgaggctgattattactgcgcaacatgggatgacagtatgaatggttgggtgttcggcggagggaccaaactgaccgtccta

SEQ ID NO: 1291 - protein, 110 aa, artificial
  VL of CDH19 14074
QSALTQPPSVTGTPGQRVTISCSGSRSNIGSNFVNWYQQLPGTAPKVLIYTNNQRPSGVPDRFSGSKSGTSASLAISGLQSEDEADYYCATWDDSMNGWVFGGGTKLTVL

SEQ ID NO: 1292 - DNA, 735 bp, artificial
  VH-VL of CDH19 14074
caggtgcagttggtgcagtctggggctgaggtgaagaagcctggggcctcagtgaaggtttcctgcaaggtttctggatacaccttcaccagctactttattcactgggtgcgccaggcccctggacaagggcttgaatggatgggaattatcaaccctattagtgttagcacaagctacgcacagaagttccagggcagagtcaccatgaccagggacacgtccacgagcacagtcttcatggagctgagcagcctgagatctgaggacacggccgtgtattactgtgcgcgaggggggatacagctatggttacatttggactactggggccagggaaccctggtcaccgtctcctcaggtggcggaggatctggcggaggtggaagcggaggcggcggatctcagtctgcgctgactcagccaccctcagtgactgggacccccgggcagagggtcaccatctcttgttctggaagcaggtccaacatcggaagcaattttgtaaactggtaccagcagctcccaggaacggcccccaaagtcctcatctatactaataatcagcggccctcaggggtccctgaccgattctctggctccaagtctggcacctcagcctccctggccatcagtgggctccagtctgaggatgaggctgattattactgcgcaacatgggatgacagtatgaatggttgggtgttcggcggagggaccaaactgaccgtccta

SEQ ID NO: 1293 - protein, 245 aa, artificial
  VH-VL of CDH19 14074
QVQLVQSGAEVKKPGASVKVSCKVSGYTFTSYFIHWVRQAPGQGLEWMGIINPISVSTSYAQKFQGRVTMTRDTSTSTVFMELSSLRSEDTAVYYCARGGIQLWLHLDYWGQGTLVTVSSGGGGSGGGGSGGGGSQSALTQPPSVTGTPGQRVTISCSGSRSNIGSNFVNWYQQLPGTAPKVLIYTNNQRPSGVPDRFSGSKSGTSASLAISGLQSEDEADYYCATWDDSMNGWVFGGGTKLTVL

SEQ ID NO: 1294 - protein, 506 aa, artificial
  CDH19 14074 x I2C
QVQLVQSGAEVKKPGASVKVSCKVSGYTFTSYFIHWVRQAPGQGLEWMGIINPISVSTSYAQKFQGRVTMTRDTSTSTVFMELSSLRSEDTAVYYCARGGIQLWLHLDYWGQGTLVTVSSGGGGSGGGGSGGGGSQSALTQPPSVTGTPGQRVTISCSGSRSNIGSNFVNWYQQLPGTAPKVLIYTNNQRPSGVPDRFSGSKSGTSASLAISGLQSEDEADYYCATWDDSMNGWVFGGGTKLTVLSGGGGSEVQLVESGGGLVQPGGSLKLSCAASGFTFNKYAMNWVRQAPGKGLEWVARIRSKYNNYATYYADSVKDRFTISRDDSKNTAYLQMNNLKTEDTAVYYCVRHGNFGNSYISYWAYWGQGTLVTVSSGGGGSGGGGSGGGGSQTVVTQEPSLTVSPGGTVTLTCGSSTGAVTSGNYPNWVQQKPGQAPRGLIGGTKFLAPGTPARFSGSLLGGKAALTLSGVQPEDEAEYYCVLWYSNRWVFGGGTKLTVLHHHHHH

SEQ ID NO: 1295 - protein, 5 aa, artificial
  CDR-H1 of CDH19  14075
SYFIH

SEQ ID NO: 1296 - protein, 17 aa, artificial
  CDR-H2 of CDH19 14075
IINPISVSTSYAQKFQG

SEQ ID NO: 1297 - protein, 11 aa, artificial
  CDR-H3 of CDH19 14075
GGIQLWLHLDY

SEQ ID NO: 1298 - protein, 13 aa, artificial
  CDR-L1 of CDH19 14075
SGSRSNIGSNFVN

SEQ ID NO: 1299 - protein, 7 aa, artificial
  CDR-L2 of CDH19 14075
TNNQRPS

SEQ ID NO: 1300 - protein, 11 aa, artificial
  CDR-L3 of CDH19 14075
ATWDESMQGWV

SEQ ID NO: 1301 - DNA, 360 bp, artificial; identical to SEQ ID NO: 367
  VH of CDH19 14075

SEQ ID NO: 1302 - protein, 120 aa, artificial; identical to SEQ ID NO: 368
  VH of CDH19 14075

SEQ ID NO: 1303 - DNA, 330 bp, artificial
  VL of CDH19  14075
cagtctgcgctgactcagccaccctcagtgactgggacccccgggcagagggtcaccatctcttgttctggaagcaggtccaacatcggaagcaattttgtaaactggtaccagcagctcccaggaacggcccccaaagtcctcatctatactaataatcagcggccctcaggggtccctgaccgattctctggctccaagtctggcacctcagcctccctggccatcagtgggctccagtctgaggatgaggctgattattactgcgcaacatgggatgagagtatgcagggttgggtgttcggcggagggaccaaactgaccgtccta

SEQ ID NO: 1304 - protein, 110 aa, artificial
  VL of CDH19  14075
QSALTQPPSVTGTPGQRVTISCSGSRSNIGSNFVNWYQQLPGTAPKVLIYTNNQRPSGVPDRFSGSKSGTSASLAISGLQSEDEADYYCATWDESMQGWVFGGGTKLTVL

SEQ ID NO: 1305 - DNA, 735 bp, artificial
  VH-VL of CDH19  14075
caggtgcagttggtgcagtctggggctgaggtgaagaagcctggggcctcagtgaaggtttcctgcaaggtttctggatacaccttcaccagctactttattcactgggtgcgccaggcccctggacaagggcttgaatggatgggaattatcaaccctattagtgttagcacaagctacgcacagaagttccagggcagagtcaccatgaccagggacacgtccacgagcacagtcttcatggagctgagcagcctgagatctgaggacacggccgtgtattactgtgcgcgaggggggatacagctatggttacatttggactactggggccagggaaccctggtcaccgtctcctcaggtggcggaggatctggcggaggtggaagcggaggcggcggatctcagtctgcgctgactcagccaccctcagtgactgggacccccgggcagagggtcaccatctcttgttctggaagcaggtccaacatcggaagcaattttgtaaactggtaccagcagctcccaggaacggcccccaaagtcctcatctatactaataatcagcggccctcaggggtccctgaccgattctctggctccaagtctggcacctcagcctccctggccatcagtgggctccagtctgaggatgaggctgattattactgcgcaacatgggatgagagtatgcagggttgggtgttcggcggagggaccaaactgaccgtccta

SEQ ID NO: 1306 - protein, 245 aa, artificial
  VH-VL of CDH19  14075
QVQLVQSGAEVKKPGASVKVSCKVSGYTFTSYFIHWVRQAPGQGLEWMGIINPISVSTSYAQKFQGRVTMTRDTSTSTVFMELSSLRSEDTAVYYCARGGIQLWLHLDYWGQGTLVTVSSGGGGSGGGGSGGGGSQSALTQPPSVTGTPGQRVTISCSGSRSNIGSNFVNWYQQLPGTAPKVLIYTNNQRPSGVPDRFSGSKSGTSASLAISGLQSEDEADYYCATWDESMQGWVFGGGTKLTVL

SEQ ID NO: 1307 - protein, 506 aa, artificial
  CDH19 14075 x I2C
QVQLVQSGAEVKKPGASVKVSCKVSGYTFTSYFIHWVRQAPGQGLEWMGIINPISVSTSYAQKFQGRVTMTRDTSTSTVFMELSSLRSEDTAVYYCARGGIQLWLHLDYWGQGTLVTVSSGGGGSGGGGSGGGGSQSALTQPPSVTGTPGQRVTISCSGSRSNIGSNFVNWYQQLPGTAPKVLIYTNNQRPSGVPDRFSGSKSGTSASLAISGLQSEDEADYYCATWDESMQGWVFGGGTKLTVLSGGGGSEVQLVESGGGLVQPGGSLKLSCAASGFTFNKYAMNWVRQAPGKGLEWVARIRSKYNNYATYYADSVKDRFTISRDDSKNTAYLQMNNLKTEDTAVYYCVRHGNFGNSYISYWAYWGQGTLVTVSSGGGGSGGGGSGGGGSQTVVTQEPSLTVSPGGTVTLTCGSSTGAVTSGNYPNWVQQKPGQAPRGLIGGTKFLAPGTPARFSGSLLGGKAALTLSGVQPEDEAEYYCVLWYSNRWVFGGGTKLTVLHHHHHH

SEQ ID NO: 1308 - protein, 5 aa, artificial
  CDR-H1 of CDH19 14024
SSGYY

SEQ ID NO: 1309 - protein, 16 aa, artificial
  CDR-H2 of CDH19 14024
YIYYTGSAYYNPSLKS

SEQ ID NO: 1310 - protein, 10 aa, artificial
  CDR-H3 of CDH19 14024
DGSSGWYFQY

SEQ ID NO: 1311 - protein, 12 aa, artificial
  CDR-L1 of CDH19 14024
RASRQISSSYLA

SEQ ID NO: 1312 - protein, 7 aa, artificial
  CDR-L2 of CDH19 14024
GPSSRAT

SEQ ID NO: 1313 - protein, 8 aa, artificial
  CDR-L3 of CDH19 14024
QQYGSSFT

SEQ ID NO: 1314 - DNA, 360 bp, artificial
  VH of CDH19 14024
caggtgcagctgcaggagtcgggcccaggactggtgaagccttcagagaccctgtccctcacctgcactgtctctggtggctccatcagcagtagtggttactactggagctggatccgccagcccccagggaagggcctggagtggattgggtacatctattacactgggagcgcctactacaacccgtccctcaagagtcgagttaccatatcagtagacacgtctaagaaccagttctccctgaagctgagctctgtgactgccgcggacacggccgtgtattactgtgcgagagatggaagcagtggctggtacttccagtattggggccagggcaccctggtcaccgtctctagt

SEQ ID NO: 1315 - protein, 120 aa, artificial; identical to SEQ ID NO: 464
  VH of CDH19 14024

SEQ ID NO: 1316 - DNA, 321 bp, artificial
  VL of CDH19 14024
gaaattgtgttgacgcagtctccaggcaccctgtctttgtctccaggggaaagagccaccctctcctgcagggccagtcggcagattagcagcagctacttagcctggtaccagcagaaacctggccaggctcccaggctcctcatctatggtccatccagcagggccactggcatcccagacaggttcagtggcagtgggtctgggacagacttcactctcaccatcagcagactggagcctgaagattttgcagtgtattactgtcagcagtatggtagctcattcactttcggccaggggaccaaagtggatatcaaa

SEQ ID NO: 1317 - protein, 107 aa, artificial
  VL of CDH19 14024
EIVLTQSPGTLSLSPGERATLSCRASRQISSSYLAWYQQKPGQAPRLLIYGPSSRATGIPDRFSGSGSGTDFTLTISRLEPEDFAVYYCQQYGSSFTFGQGTKVDIK

SEQ ID NO: 1318 - DNA, 726 bp, artificial
  VH-VL of CDH19
caggtgcagctgcaggagtcgggcccaggactggtgaagccttcagagaccctgtccctcacctgcactgtctctggtggctccatcagcagtagtggttactactggagctggatccgccagcccccagggaagggcctggagtggattgggtacatctattacactgggagcgcctactacaacccgtccctcaagagtcgagttaccatatcagtagacacgtctaagaaccagttctccctgaagctgagctctgtgactgccgcggacacggccgtgtattactgtgcgagagatggaagcagtggctggtacttccagtattggggccagggcaccctggtcaccgtctctagtggtggcggaggatctggcggaggtggaagcggaggcggcggatctgaaattgtgttgacgcagtctccaggcaccctgtctttgtctccaggggaaagagccaccctctcctgcagggccagtcggcagattagcagcagctacttagcctggtaccagcagaaacctggccaggctcccaggctcctcatctatggtccatccagcagggccactggcatcccagacaggttcagtggcagtgggtctgggacagacttcactctcaccatcagcagactggagcctgaagattttgcagtgtattactgtcagcagtatggtagctcattcactttcggccaggggaccaaagtggatatcaaa

SEQ ID NO: 1319 - protein, 242 aa, artificial
  VH-VL of CDH19
QVQLQESGPGLVKPSETLSLTCTVSGGSISSSGYYWSWIRQPPGKGLEWIGYIYYTGSAYYNPSLKSRVTISVDTSKNQFSLKLSSVTAADTAVYYCARDGSSGWYFQYWGQGTLVTVSSGGGGSGGGGSGGGGSEIVLTQSPGTLSLSPGERATLSCRASRQISSSYLAWYQQKPGQAPRLLIYGPSSRATGIPDRFSGSGSGTDFTLTISRLEPEDFAVYYCQQYGSSFTFGQGTKVDIK

SEQ ID NO: 1320 - protein, 503 aa, artificial
  CDH19 14024 x I2C
QVQLQESGPGLVKPSETLSLTCTVSGGSISSSGYYWSWIRQPPGKGLEWIGYIYYTGSAYYNPSLKSRVTISVDTSKNQFSLKLSSVTAADTAVYYCARDGSSGWYFQYWGQGTLVTVSSGGGGSGGGGSGGGGSEIVLTQSPGTLSLSPGERATLSCRASRQISSSYLAWYQQKPGQAPRLLIYGPSSRATGIPDRFSGSGSGTDFTLTISRLEPEDFAVYYCQQYGSSFTFGQGTKVDIKSGGGGSEVQLVESGGGLVQPGGSLKLSCAASGFTFNKYAMNWVRQAPGKGLEWVARIRSKYNNYATYYADSVKDRFTISRDDSKNTAYLQMNNLKTEDTAVYYCVRHGNFGNSYISYWAYWGQGTLVTVSSGGGGSGGGGSGGGGSQTVVTQEPSLTVSPGGTVTLTCGSSTGAVTSGNYPNWVQQKPGQAPRGLIGGTKFLAPGTPARFSGSLLGGKAALTLSGVQPEDEAEYYCVLWYSNRWVFGGGTKLTVLHHHHHH

SEQ ID NO: 1321 - protein, 5 aa, artificial
  CDR-H1 of CDH19 14054
SYDMH

SEQ ID NO: 1322 - protein, 17 aa, artificial
  CDR-H2 of CDH19 14054
VISYDGTNEYYADSVKG

SEQ ID NO: 1323 - protein, 10 aa, artificial
  CDR-H3 of CDH19 14054
ERYFDWSFDY

SEQ ID NO: 1324 - protein, 12 aa, artificial
  CDR-L1 of CDH19 14054
RASQSVSNTYLA

SEQ ID NO: 1325 - protein, 7 aa, artificial
  CDR-L2 of CDH19 14054
GASSRAT

SEQ ID NO: 1326 - protein, 8 aa, artificial
  CDR-L3 of CDH19 14054
QQYSNSWT

SEQ ID NO: 1327 - DNA, 357 bp, artificial
  VH of CDH19 14054
caggtgcagctggtggagtctgggggaggcgtggtccagcctggggggtccctgagactctcctgtgcagcctctggattcaccttcagtagctatgacatgcactgggtccgccaggctccaggcaaggggctggagtgggtggcagttatatcatatgatggaactaatgaatactatgcagactccgtgaagggccgattcaccatctccagagacacttccaagaacacgctgtatttgcaaatgaacagcctgagagctgaggacacggctgtatattactgtgcgagagaacgatattttgactggtcttttgactactggggccagggaaccctggtcagcgtctctagt

SEQ ID NO: 1328 - protein, 119 aa, artificial; identical to SEQ ID NO: 490
  VH of CDH19 14054

SEQ ID NO: 1329 - DNA, 321 bp, artificial
  VL of CDH19 14054
gaaattgtattgacgcagtctccaggcaccctgtctttgtctccaggggaaagagccaccctctcctgcagggccagtcagagtgttagcaacacctacttagcctggtaccagcagagacctggccaggctcccaggctcctcatctatggtgcatccagcagggccactggcatcccagacagattcagtggcagtgggtctgggacagacttcactctcaccatcagcagtctggagcctgaagattttgcagtgtattactgtcagcagtacagtaactcgtggacgttcggccaagggaccaaggtggaaatcaaa

SEQ ID NO: 1330 - protein, 107 aa, artificial
  VL of CDH19 14054
EIVLTQSPGTLSLSPGERATLSCRASQSVSNTYLAWYQQRPGQAPRLLIYGASSRATGIPDRFSGSGSGTDFTLTISSLEPEDFAVYYCQQYSNSWTFGQGTKVEIK

SEQ ID NO: 1331 - DNA, 723 bp, artificial
  VH-VL of CDH19 14054
caggtgcagctggtggagtctgggggaggcgtggtccagcctggggggtccctgagactctcctgtgcagcctctggattcaccttcagtagctatgacatgcactgggtccgccaggctccaggcaaggggctggagtgggtggcagttatatcatatgatggaactaatgaatactatgcagactccgtgaagggccgattcaccatctccagagacacttccaagaacacgctgtatttgcaaatgaacagcctgagagctgaggacacggctgtatattactgtgcgagagaacgatattttgactggtcttttgactactggggccagggaaccctggtcagcgtctctagtggtggcggaggatctggcggaggtggaagcggaggcggcggatctgaaattgtattgacgcagtctccaggcaccctgtctttgtctccaggggaaagagccaccctctcctgcagggccagtcagagtgttagcaacacctacttagcctggtaccagcagagacctggccaggctcccaggctcctcatctatggtgcatccagcagggccactggcatcccagacagattcagtggcagtgggtctgggacagacttcactctcaccatcagcagtctggagcctgaagattttgcagtgtattactgtcagcagtacagtaactcgtggacgttcggccaagggaccaaggtggaaatcaaa

SEQ ID NO: 1332 - protein, 241 aa, artificial
  VH-VL of CDH19 14054
QVQLVESGGGVVQPGGSLRLSCAASGFTFSSYDMHWVRQAPGKGLEWVAVISYDGTNEYYADSVKGRFTISRDTSKNTLYLQMNSLRAEDTAVYYCARERYFDWSFDYWGQGTLVSVSSGGGGSGGGGSGGGGSEIVLTQSPGTLSLSPGERATLSCRASQSVSNTYLAWYQQRPGQAPRLLIYGASSRATGIPDRFSGSGSGTDFTLTISSLEPEDFAVYYCQQYSNSWTFGQGTKVEIK

SEQ ID NO: 1333 - protein, 502 aa, artificial
  CDH19 14054 x I2C
QVQLVESGGGVVQPGGSLRLSCAASGFTFSSYDMHWVRQAPGKGLEWVAVISYDGTNEYYADSVKGRFTISRDTSKNTLYLQMNSLRAEDTAVYYCARERYFDWSFDYWGQGTLVSVSSGGGGSGGGGSGGGGSEIVLTQSPGTLSLSPGERATLSCRASQSVSNTYLAWYQQRPGQAPRLLIYGASSRATGIPDRFSGSGSGTDFTLTISSLEPEDFAVYYCQQYSNSWTFGQGTKVEIKSGGGGSEVQLVESGGGLVQPGGSLKLSCAASGFTFNKYAMNWVRQAPGKGLEWVARIRSKYNNYATYYADSVKDRFTISRDDSKNTAYLQMNNLKTEDTAVYYCVRHGNFGNSYISYWAYWGQGTLVTVSSGGGGSGGGGSGGGGSQTVVTQEPSLTVSPGGTVTLTCGSSTGAVTSGNYPNWVQQKPGQAPRGLIGGTKFLAPGTPARFSGSLLGGKAALTLSGVQPEDEAEYYCVLWYSNRWVFGGGTKLTVLHHHHHH

SEQ ID NO: 1334 - protein, 5 aa, artificial
  CDR-H1 of CDH19 14056
GYYWS

SEQ ID NO: 1335 - protein, 16 aa, artificial
  CDR-H2 of CDH19 14056
YFSYSGSTNYNPSLKS

SEQ ID NO: 1336 - protein, 8 aa, artificial
  CDR-H3 of CDH19 14056
NWAFHFDF

SEQ ID NO: 1337 - protein, 14 aa, artificial
  CDR-L1 of CDH19 14056
TGSSSNIGTGYAVH

SEQ ID NO: 1338 - protein, 7 aa, artificial
  CDR-L2 of CDH19 14056
GNNNRPS

SEQ ID NO: 1339 - protein, 11 aa, artificial
  CDR-L3 of CDH19 14056
QSYDSRLSGWV

SEQ ID NO: 1340 - DNA, 348 bp, artificial
  VH of CDH19 14056
caggtgcagctgcaggagtcgggcccaggactggtgaagccttcggagaccctgtccctcacctgcactgtctctggtggctccatcagtggttactactggagctggatccggcagcccccaggaaagggactggagtggtttgcatatttctcttacagtgggagcaccaactacaacccctccctcaagagtcgagtcaccttatcagtagacacgtccaagaaccagttctccctgaagctgagctctgtgaccgctgcggacacggccgtgtattactgtgcgaggaactgggccttccactttgacttctggggccagggaaccctggtcaccgtctctagt

SEQ ID NO: 1341 - protein, 116 aa, artificial; identical to SEQ ID NO: 362
  VH of CDH19 14056

SEQ ID NO: 1342 - DNA, 333 bp, artificial
  VL of CDH19 14056
cagtctgtgctgacgcagccgccctcagtgtctggggccccaggacagagggtcaccatctcctgcactgggagcagctccaacatcgggacaggttatgctgtacactggtaccagcagcttccaggaacagcccccaaactcctcatctatggtaacaacaatcggccctcaggggttcctgaccgattctctggctccaagtctggcacctcagcctccctggccatcactgggctccaggctgaggatgaggctgattattactgccagtcctatgacagcagactgagtggttgggtgttcggcggagggaccaagctgaccgtccta

SEQ ID NO: 1343 - protein, 111 aa, artificial
  VL of CDH19 14056
QSVLTQPPSVSGAPGQRVTISCTGSSSNIGTGYAVHWYQQLPGTAPKLLIYGNNNRPSGVPDRFSGSKSGTSASLAITGLQAEDEADYYCQSYDSRLSGWVFGGGTKLTVL

SEQ ID NO: 1344 - DNA, 726 bp, artificial
  VH-VL of CDH19 14056
caggtgcagctgcaggagtcgggcccaggactggtgaagccttcggagaccctgtccctcacctgcactgtctctggtggctccatcagtggttactactggagctggatccggcagcccccaggaaagggactggagtggtttgcatatttctcttacagtgggagcaccaactacaacccctccctcaagagtcgagtcaccttatcagtagacacgtccaagaaccagttctccctgaagctgagctctgtgaccgctgcggacacggccgtgtattactgtgcgaggaactgggccttccactttgacttctggggccagggaaccctggtcaccgtctctagtggtggcggaggatctggcggaggtggaagcggaggcggcggatctcagtctgtgctgacgcagccgccctcagtgtctggggccccaggacagagggtcaccatctcctgcactgggagcagctccaacatcgggacaggttatgctgtacactggtaccagcagcttccaggaacagcccccaaactcctcatctatggtaacaacaatcggccctcaggggttcctgaccgattctctggctccaagtctggcacctcagcctccctggccatcactgggctccaggctgaggatgaggctgattattactgccagtcctatgacagcagactgagtggttgggtgttcggcggagggaccaagctgaccgtccta

SEQ ID NO: 1345 - protein, 242 aa, artificial
  VH-VL of CDH19 14056
QVQLQESGPGLVKPSETLSLTCTVSGGSISGYYWSWIRQPPGKGLEWFAYFSYSGSTNYNPSLKSRVTLSVDTSKNQFSLKLSSVTAADTAVYYCARNWAFHFDFWGQGTLVTVSSGGGGSGGGGSGGGGSQSVLTQPPSVSGAPGQRVTISCTGSSSNIGTGYAVHWYQQLPGTAPKLLIYGNNNRPSGVPDRFSGSKSGTSASLAITGLQAEDEADYYCQSYDSRLSGWVFGGGTKLTVL

SEQ ID NO: 1346 - protein, 503 aa, artificial
  CDH19 14056 x I2C
QVQLQESGPGLVKPSETLSLTCTVSGGSISGYYWSWIRQPPGKGLEWFAYFSYSGSTNYNPSLKSRVTLSVDTSKNQFSLKLSSVTAADTAVYYCARNWAFHFDFWGQGTLVTVSSGGGGSGGGGSGGGGSQSVLTQPPSVSGAPGQRVTISCTGSSSNIGTGYAVHWYQQLPGTAPKLLIYGNNNRPSGVPDRFSGSKSGTSASLAITGLQAEDEADYYCQSYDSRLSGWVFGGGTKLTVLSGGGGSEVQLVESGGGLVQPGGSLKLSCAASGFTFNKYAMNWVRQAPGKGLEWVARIRSKYNNYATYYADSVKDRFTISRDDSKNTAYLQMNNLKTEDTAVYYCVRHGNFGNSYISYWAYWGQGTLVTVSSGGGGSGGGGSGGGGSQTVVTQEPSLTVSPGGTVTLTCGSSTGAVTSGNYPNWVQQKPGQAPRGLIGGTKFLAPGTPARFSGSLLGGKAALTLSGVQPEDEAEYYCVLWYSNRWVFGGGTKLTVLHHHHHH

SEQ ID NO: 1347 - protein, 5 aa, artificial
  CDR-H1 of CDH19 14057
GYYWS

SEQ ID NO: 1348 - protein, 16 aa, artificial
  CDR-H2 of CDH19 14057
YFSYSGSTNYNPSLKS

SEQ ID NO: 1349 - protein, 8 aa, artificial
  CDR-H3 of CDH19 14057
NWAFHFDF

SEQ ID NO: 1350 - protein, 14 aa, artificial
  CDR-L1 of CDH19 14057
TGSSSNIGTGYAVH

SEQ ID NO: 1351 - protein, 7 aa, artificial
  CDR-L2 of CDH19 14057
GNNNRPS

SEQ ID NO: 1352 - protein, 11 aa, artificial
  CDR-L3 of CDH19 14057
QSYDSRLSGWV

SEQ ID NO: 1353 - DNA, 348 bp, artificial
  VH of CDH19 14057
caggtgcagctgcaggagtcgggcccaggactggtgaagccttcggagaccctgtccctcacctgcactgtctctggtggctccatcagtggttactactggagctggatccggcagcccccaggaaagggactggagtggattggatatttctcttacagtgggagcaccaactacaacccctccctcaagagtcgagtcaccttatcagtagacacgtccaagaaccagttctccctgaagctgagctctgtgaccgctgcggacacggccgtgtattactgtgcgaggaactgggccttccactttgacttctggggccagggaaccctggtcaccgtctctagt

SEQ ID NO: 1354 - protein, 116 aa, artificial; identical to SEQ ID NO: 493
  VH of CDH19 14057

SEQ ID NO: 1355 - DNA, 333 bp, artificial; identical to SEQ ID NO: 1342
  VL of CDH19 14057

SEQ ID NO: 1356 - protein, 111 aa, artificial; identical to SEQ ID NO: 1343
  VL of CDH19 14057

SEQ ID NO: 1357 - DNA, 726 bp, artificial
  VH-VL of CDH19 14057
caggtgcagctgcaggagtcgggcccaggactggtgaagccttcggagaccctgtccctcacctgcactgtctctggtggctccatcagtggttactactggagctggatccggcagcccccaggaaagggactggagtggattggatatttctcttacagtgggagcaccaactacaacccctccctcaagagtcgagtcaccttatcagtagacacgtccaagaaccagttctccctgaagctgagctctgtgaccgctgcggacacggccgtgtattactgtgcgaggaactgggccttccactttgacttctggggccagggaaccctggtcaccgtctctagtggtggcggaggatctggcggaggtggaagcggaggcggcggatctcagtctgtgctgacgcagccgccctcagtgtctggggccccaggacagagggtcaccatctcctgcactgggagcagctccaacatcgggacaggttatgctgtacactggtaccagcagcttccaggaacagcccccaaactcctcatctatggtaacaacaatcggccctcaggggttcctgaccgattctctggctccaagtctggcacctcagcctccctggccatcactgggctccaggctgaggatgaggctgattattactgccagtcctatgacagcagactgagtggttgggtgttcggcggagggaccaagctgaccgtccta

SEQ ID NO: 1358 - protein, 242 aa, artificial
  VH-VL of CDH19 14057
QVQLQESGPGLVKPSETLSLTCTVSGGSISGYYWSWIRQPPGKGLEWIGYFSYSGSTNYNPSLKSRVTLSVDTSKNQFSLKLSSVTAADTAVYYCARNWAFHFDFWGQGTLVTVSSGGGGSGGGGSGGGGSQSVLTQPPSVSGAPGQRVTISCTGSSSNIGTGYAVHWYQQLPGTAPKLLIYGNNNRPSGVPDRFSGSKSGTSASLAITGLQAEDEADYYCQSYDSRLSGWVFGGGTKLTVL

SEQ ID NO: 1359 - protein, 503 aa, artificial
  CDH19 14057 x I2C
QVQLQESGPGLVKPSETLSLTCTVSGGSISGYYWSWIRQPPGKGLEWIGYFSYSGSTNYNPSLKSRVTLSVDTSKNQFSLKLSSVTAADTAVYYCARNWAFHFDFWGQGTLVTVSSGGGGSGGGGSGGGGSQSVLTQPPSVSGAPGQRVTISCTGSSSNIGTGYAVHWYQQLPGTAPKLLIYGNNNRPSGVPDRFSGSKSGTSASLAITGLQAEDEADYYCQSYDSRLSGWVFGGGTKLTVLSGGGGSEVQLVESGGGLVQPGGSLKLSCAASGFTFNKYAMNWVRQAPGKGLEWVARIRSKYNNYATYYADSVKDRFTISRDDSKNTAYLQMNNLKTEDTAVYYCVRHGNFGNSYISYWAYWGQGTLVTVSSGGGGSGGGGSGGGGSQTVVTQEPSLTVSPGGTVTLTCGSSTGAVTSGNYPNWVQQKPGQAPRGLIGGTKFLAPGTPARFSGSLLGGKAALTLSGVQPEDEAEYYCVLWYSNRWVFGGGTKLTVLHHHHHH

SEQ ID NO: 1360 - protein, 5 aa, artificial
  CDR-H1 of CDH19 14049
SYSWS

SEQ ID NO: 1361 - protein, 16 aa, artificial
  CDR-H2 of CDH19 14049
YIYYSGSTNYNPSLKS

SEQ ID NO: 1362 - protein, 8 aa, artificial
  CDR-H3 of CDH19 14049
NWAFHFDY

SEQ ID NO: 1363 - protein, 14 aa, artificial
  CDR-L1 of CDH19 14049
TGSSSNIGTGYDVH

SEQ ID NO: 1364 - protein, 7 aa, artificial
  CDR-L2 of CDH19 14049
GNSNRPS

SEQ ID NO: 1365 - protein, 11 aa, artificial
  CDR-L3 of CDH19 14049
QSYDSSLSGWV

SEQ ID NO: 1366 - DNA, 348 bp, artificial
  VH of CDH19 14049
caggtgcagctgcaggagtcgggcccaggactggtgaagccttcggagaccctgtccctcacctgcactgtctctggtggctccatcagtagttactcctggagctggatccggcagcccccagggaagggactggagtggattgggtatatctattacagtgggagcaccaactacaacccctccctcaagagtcgagtcaccatatcattagacacgtccaagaaccagttctccctgaagctgagctctgtgaccgctgcggacacggccgtgtattactgtgcgaggaactgggccttccactttgactactggggccagggaaccctggtcaccgtctctagt

SEQ ID NO: 1367 - protein, 116 aa, artificial; identical to SEQ ID NO: 364
  VH of CDH19 14049

SEQ ID NO: 1368 - DNA, 333 bp, artificial
  VL of CDH19 14049
cagtctgtgctgacgcagccgccctcagtgtctggggccccagggcagagggtcaccatctcctgcactgggagcagctccaatatcgggacaggttatgatgtacactggtatcagcagcttccaggaacagcccccaaactcctcatctatggtaacagcaatcggccctcaggggtccctgaccgattctctggctccaagtctggcacctcagcctccctggccatcactgggctccaggctgaggatgaggctgattattactgccagtcctatgacagcagtctgagtggttgggtgttcggcggagggaccaggttgaccgtccta

SEQ ID NO: 1369 - protein, 111 aa, artificial
  VL of CDH19 14049
QSVLTQPPSVSGAPGQRVTISCTGSSSNIGTGYDVHWYQQLPGTAPKLLIYGNSNRPSGVPDRFSGSKSGTSASLAITGLQAEDEADYYCQSYDSSLSGWVFGGGTRLTVL

SEQ ID NO: 1370 - DNA, 726 bp, artificial
  VH-VL of CDH19 14049
caggtgcagctgcaggagtcgggcccaggactggtgaagccttcggagaccctgtccctcacctgcactgtctctggtggctccatcagtagttactcctggagctggatccggcagcccccagggaagggactggagtggattgggtatatctattacagtgggagcaccaactacaacccctccctcaagagtcgagtcaccatatcattagacacgtccaagaaccagttctccctgaagctgagctctgtgaccgctgcggacacggccgtgtattactgtgcgaggaactgggccttccactttgactactggggccagggaaccctggtcaccgtctctagtggtggcggaggatctggcggaggtggaagcggaggcggcggatctcagtctgtgctgacgcagccgccctcagtgtctggggccccagggcagagggtcaccatctcctgcactgggagcagctccaatatcgggacaggttatgatgtacactggtatcagcagcttccaggaacagcccccaaactcctcatctatggtaacagcaatcggccctcaggggtccctgaccgattctctggctccaagtctggcacctcagcctccctggccatcactgggctccaggctgaggatgaggctgattattactgccagtcctatgacagcagtctgagtggttgggtgttcggcggagggaccaggttgaccgtccta

SEQ ID NO: 1371 - protein, 242 aa, artificial
  VH-VL of CDH19 14049
QVQLQESGPGLVKPSETLSLTCTVSGGSISSYSWSWIRQPPGKGLEWIGYIYYSGSTNYNPSLKSRVTISLDTSKNQFSLKLSSVTAADTAVYYCARNWAFHFDYWGQGTLVTVSSGGGGSGGGGSGGGGSQSVLTQPPSVSGAPGQRVTISCTGSSSNIGTGYDVHWYQQLPGTAPKLLIYGNSNRPSGVPDRFSGSKSGTSASLAITGLQAEDEADYYCQSYDSSLSGWVFGGGTRLTVL

SEQ ID NO: 1372 - protein, 503 aa, artificial
  CDH19 14049 x I2C
QVQLQESGPGLVKPSETLSLTCTVSGGSISSYSWSWIRQPPGKGLEWIGYIYYSGSTNYNPSLKSRVTISLDTSKNQFSLKLSSVTAADTAVYYCARNWAFHFDYWGQGTLVTVSSGGGGSGGGGSGGGGSQSVLTQPPSVSGAPGQRVTISCTGSSSNIGTGYDVHWYQQLPGTAPKLLIYGNSNRPSGVPDRFSGSKSGTSASLAITGLQAEDEADYYCQSYDSSLSGWVFGGGTRLTVLSGGGGSEVQLVESGGGLVQPGGSLKLSCAASGFTFNKYAMNWVRQAPGKGLEWVARIRSKYNNYATYYADSVKDRFTISRDDSKNTAYLQMNNLKTEDTAVYYCVRHGNFGNSYISYWAYWGQGTLVTVSSGGGGSGGGGSGGGGSQTVVTQEPSLTVSPGGTVTLTCGSSTGAVTSGNYPNWVQQKPGQAPRGLIGGTKFLAPGTPARFSGSLLGGKAALTLSGVQPEDEAEYYCVLWYSNRWVFGGGTKLTVLHHHHHH

SEQ ID NO: 1373 - protein, 5 aa, artificial
  CDR-H1 of CDH19 14302
SYGMH

SEQ ID NO: 1374 - protein, 17 aa, artificial
  CDR-H2 of CDH19 14302
FIWYDGSNKYYADSVKD

SEQ ID NO: 1375 - protein, 16 aa, artificial
  CDR-H3 of CDH19 14302
RAGIIGTIGYYYGMDV

SEQ ID NO: 1376 - protein, 11 aa, artificial
  CDR-L1 of CDH19 14302
SGDRLGEKYTS

SEQ ID NO: 1377 - protein, 7 aa, artificial
  CDR-L2 of CDH19 14302
QDTKRPS

SEQ ID NO: 1378 - protein, 9 aa, artificial
  CDR-L3 of CDH19 14302
QAWESSTVV

SEQ ID NO: 1379 - DNA, 375 bp, artificial
  VH of CDH19 14302
caggtgcagttggtggagtctgggggaggcgtggtccagcctggggggtccctgagactctcctgtgcagcgtctggattcaccttcagtagctatggcatgcactgggtccgccaggctccaggcaaggggctggagtgggtggcatttatatggtatgatggaagtaataaatactatgcagactccgtgaaggaccgattcaccatctccagagacaattccaagaacacgctgtatctgcaaatgaatagcctgagagctgaggacacggctgtgtattactgtgcgagaagggccggtataataggaactataggctactactacggtatggacgtctggggccaagggaccacggtcaccgtctctagt

SEQ ID NO: 1380 - protein, 125 aa, artificial; identical to SEQ ID NO: 541
  VH of CDH19 14302

SEQ ID NO: 1381 - DNA, 318 bp, artificial; identical to SEQ ID NO: 1186
  VL of CDH19 14302

SEQ ID NO: 1382 - protein, 106 aa, artificial; identical to SEQ ID NO: 1187
  VL of CDH19 14302

SEQ ID NO: 1383 - DNA, 738 bp, artificial
  VH-VL of CDH19 14302
caggtgcagttggtggagtctgggggaggcgtggtccagcctggggggtccctgagactctcctgtgcagcgtctggattcaccttcagtagctatggcatgcactgggtccgccaggctccaggcaaggggctggagtgggtggcatttatatggtatgatggaagtaataaatactatgcagactccgtgaaggaccgattcaccatctccagagacaattccaagaacacgctgtatctgcaaatgaatagcctgagagctgaggacacggctgtgtattactgtgcgagaagggccggtataataggaactataggctactactacggtatggacgtctggggccaagggaccacggtcaccgtctctagtggtggcggaggatctggcggaggtggaagcggaggcggcggatcttcctatgaactgactcagccaccctcagtgtccgtgtccccaggacagacagccagcatcacctgctctggagataggttgggggaaaaatatactagctggtatcagcagaggccaggccagtcccctttgctggtcatctatcaagataccaagcggccctcagggatccctgagcgattctctggctccaactctggtaacacagccactctgaccatcagcgggacccaggctatggatgaggctgactattactgtcaggcgtgggagagcagcactgtggtattcggcggagggaccaagctgaccgtccta

SEQ ID NO: 1384 - protein, 246 aa, artificial
  VH-VL of CDH19 14302
QVQLVESGGGVVQPGGSLRLSCAASGFTFSSYGMHWVRQAPGKGLEWVAFIWYDGSNKYYADSVKDRFTISRDNSKNTLYLQMNSLRAEDTAVYYCARRAGIIGTIGYYYGMDVWGQGTTVTVSSGGGGSGGGGSGGGGSSYELTQPPSVSVSPGQTASITCSGDRLGEKYTSWYQQRPGQSPLLVIYQDTKRPSGIPERFSGSNSGNTATLTISGTQAMDEADYYCQAWESSTVVFGGGTKLTVL

SEQ ID NO: 1385 - protein, 507 aa, artificial
  CDH19 14302 x I2C
QVQLVESGGGVVQPGGSLRLSCAASGFTFSSYGMHWVRQAPGKGLEWVAFIWYDGSNKYYADSVKDRFTISRDNSKNTLYLQMNSLRAEDTAVYYCARRAGIIGTIGYYYGMDVWGQGTTVTVSSGGGGSGGGGSGGGGSSYELTQPPSVSVSPGQTASITCSGDRLGEKYTSWYQQRPGQSPLLVIYQDTKRPSGIPERFSGSNSGNTATLTISGTQAMDEADYYCQAWESSTVVFGGGTKLTVLSGGGGSEVQLVESGGGLVQPGGSLKLSCAASGFTFNKYAMNWVRQAPGKGLEWVARIRSKYNNYATYYADSVKDRFTISRDDSKNTAYLQMNNLKTEDTAVYYCVRHGNFGNSYISYWAYWGQGTLVTVSSGGGGSGGGGSGGGGSQTVVTQEPSLTVSPGGTVTLTCGSSTGAVTSGNYPNWVQQKPGQAPRGLIGGTKFLAPGTPARFSGSLLGGKAALTLSGVQPEDEAEYYCVLWYSNRWVFGGGTKLTVLHHHHHH

SEQ ID NO: 1386 - protein, 5 aa, artificial
  CDR-H1 of CDH19 14303
SYGMH

SEQ ID NO: 1387 - protein, 17 aa, artificial
  CDR-H2 of CDH19 14303
FIWYEGSNKYYAESVKD

SEQ ID NO: 1388 - protein, 16 aa, artificial
  CDR-H3 of CDH19 14303
RAGIIGTIGYYYGMDV

SEQ ID NO: 1389 - protein, 11 aa, artificial
  CDR-L1 of CDH19 14303
SGDRLGEKYTS

SEQ ID NO: 1390 - protein, 7 aa, artificial
  CDR-L2 of CDH19 14303
QDTKRPS

SEQ ID NO: 1391 - protein, 9 aa, artificial
  CDR-L3 of CDH19 14303
QAWESSTVV

SEQ ID NO: 1392 - DNA, 375 bp, artificial
  VH of CDH19 14303
caggtgcagttggtggagtctgggggaggcgtggtccagcctgggaggtccctgagactctcctgtgcagcgtctggattcaccttcagtagctatggcatgcactgggtccgccaggctccaggcaaggggctggagtgggtggcatttatatggtatgagggaagtaataaatactatgcagagtccgtgaaggaccgattcaccatctccagagacaattccaagaacacgctgtatctgcaaatgaaaagcctgagagctgaggacacggctgtgtattactgtgcgagaagggccggtataataggaactataggctactactacggtatggacgtctggggccaagggaccacggtcaccgtctctagt

SEQ ID NO: 1393 - protein, 125 aa, artificial; identical to SEQ ID NO: 542
  VH of CDH19 14303

SEQ ID NO: 1394 - DNA, 318 bp, artificial; identical to SEQ ID NO: 1186
  VL of CDH19 14303

SEQ ID NO: 1395 - protein, 106 aa, artificial; identical to SEQ ID NO: 1187
  VL of CDH19 14303

SEQ ID NO: 1396 - DNA, 738 bp, artificial
  VH-VL of CDH19 14303
caggtgcagttggtggagtctgggggaggcgtggtccagcctgggaggtccctgagactctcctgtgcagcgtctggattcaccttcagtagctatggcatgcactgggtccgccaggctccaggcaaggggctggagtgggtggcatttatatggtatgagggaagtaataaatactatgcagagtccgtgaaggaccgattcaccatctccagagacaattccaagaacacgctgtatctgcaaatgaaaagcctgagagctgaggacacggctgtgtattactgtgcgagaagggccggtataataggaactataggctactactacggtatggacgtctggggccaagggaccacggtcaccgtctctagtggtggcggaggatctggcggaggtggaagcggaggcggcggatcttcctatgaactgactcagccaccctcagtgtccgtgtccccaggacagacagccagcatcacctgctctggagataggttgggggaaaaatatactagctggtatcagcagaggccaggccagtcccctttgctggtcatctatcaagataccaagcggccctcagggatccctgagcgattctctggctccaactctggtaacacagccactctgaccatcagcgggacccaggctatggatgaggctgactattactgtcaggcgtgggagagcagcactgtggtattcggcggagggaccaagctgaccgtccta

SEQ ID NO: 1397 - protein, 246 aa, artificial
  VH-VL of CDH19 14303
QVQLVESGGGVVQPGRSLRLSCAASGFTFSSYGMHWVRQAPGKGLEWVAFIWYEGSNKYYAESVKDRFTISRDNSKNTLYLQMKSLRAEDTAVYYCARRAGIIGTIGYYYGMDVWGQGTTVTVSSGGGGSGGGGSGGGGSSYELTQPPSVSVSPGQTASITCSGDRLGEKYTSWYQQRPGQSPLLVIYQDTKRPSGIPERFSGSNSGNTATLTISGTQAMDEADYYCQAWESSTVVFGGGTKLTVL

SEQ ID NO: 1398 - protein, 507 aa, artificial
  CDH19 14303 x I2C
QVQLVESGGGVVQPGRSLRLSCAASGFTFSSYGMHWVRQAPGKGLEWVAFIWYEGSNKYYAESVKDRFTISRDNSKNTLYLQMKSLRAEDTAVYYCARRAGIIGTIGYYYGMDVWGQGTTVTVSSGGGGSGGGGSGGGGSSYELTQPPSVSVSPGQTASITCSGDRLGEKYTSWYQQRPGQSPLLVIYQDTKRPSGIPERFSGSNSGNTATLTISGTQAMDEADYYCQAWESSTVVFGGGTKLTVLSGGGGSEVQLVESGGGLVQPGGSLKLSCAASGFTFNKYAMNWVRQAPGKGLEWVARIRSKYNNYATYYADSVKDRFTISRDDSKNTAYLQMNNLKTEDTAVYYCVRHGNFGNSYISYWAYWGQGTLVTVSSGGGGSGGGGSGGGGSQTVVTQEPSLTVSPGGTVTLTCGSSTGAVTSGNYPNWVQQKPGQAPRGLIGGTKFLAPGTPARFSGSLLGGKAALTLSGVQPEDEAEYYCVLWYSNRWVFGGGTKLTVLHHHHHH

SEQ ID NO: 1399 - protein, 5 aa, artificial
  CDR-H1 of CDH19 14078
RYGIH

SEQ ID NO: 1400 - protein, 17 aa, artificial
  CDR-H2 of CDH19 14078
VIWYDGSNKYYADSVKG

SEQ ID NO: 1401 - protein, 16 aa, artificial
  CDR-H3 of CDH19 14078
RAGIPGTTGYYYGMDV

SEQ ID NO: 1402 - protein, 11 aa, artificial
  CDR-L1 of CDH19 14078
SGDRLGEKYVS

SEQ ID NO: 1403 - protein, 7 aa, artificial
  CDR-L2 of CDH19 14078
QDNKWPS

SEQ ID NO: 1404 - protein, 9 aa, artificial
  QDNKWPS
QAWDSSTVV

SEQ ID NO: 1405 - DNA, 375 bp, artificial
  VH of CDH19 14078
caggtgcagctggtggagtctgggggaggcgtggtccagcctggggggtccctgagactctcctgtgcagcgtctggattcaccttcagtcgctatggcatacactgggtccgccaggctccaggcaaggggctggagtgggtggcagttatatggtatgatggaagtaataaatactatgcagactccgtgaagggccgattcaccatctccagagacaattccaagaacacgctgtatctgcaaatgaacagcctgagagccgaggactcggctgtgtattactgtgcgagaagggccggtatacctggaactacgggctactactatggtatggacgtctggggccaagggaccacggtcaccgtctcctca

SEQ ID NO: 1406 - protein, 125 aa, artificial; identical to SEQ ID NO: 514
  VH of CDH19 14078

SEQ ID NO: 1407 - DNA, 318 bp, artificial; identical to SEQ ID NO: 1199
  VL of CDH19 14078

SEQ ID NO: 1408 - protein, 106 aa, artificial; identical to SEQ ID NO: 1200
  VL of CDH19 14078

SEQ ID NO: 1409 - DNA, 738 bp, artificial
  VH-VL of CDH19 14078
caggtgcagctggtggagtctgggggaggcgtggtccagcctggggggtccctgagactctcctgtgcagcgtctggattcaccttcagtcgctatggcatacactgggtccgccaggctccaggcaaggggctggagtgggtggcagttatatggtatgatggaagtaataaatactatgcagactccgtgaagggccgattcaccatctccagagacaattccaagaacacgctgtatctgcaaatgaacagcctgagagccgaggactcggctgtgtattactgtgcgagaagggccggtatacctggaactacgggctactactatggtatggacgtctggggccaagggaccacggtcaccgtctcctcaggtggcggaggatctggcggaggtggaagcggaggcggcggatcttcctatgagctgactcagccaccctcagtgtccgtgtccccaggacagacagccagcatcacctgctctggagatagattgggggagaaatatgttagctggtatcagcagaagccaggccagtcccctatactggtcatctatcaagataataagtggccctcagggatccctgagcgattctctggctccaactctgggaacacagccactctgaccatcagcgggacccaggctatggatgaggctgactattactgtcaggcgtgggacagcagcactgtggtattcggcggggggaccaagctgaccgtccta

SEQ ID NO: 1410 - protein, 246 aa, artificial
  VH-VL of CDH19 14078
QVQLVESGGGVVQPGGSLRLSCAASGFTFSRYGIHWVRQAPGKGLEWVAVIWYDGSNKYYADSVKGRFTISRDNSKNTLYLQMNSLRAEDSAVYYCARRAGIPGTTGYYYGMDVWGQGTTVTVSSGGGGSGGGGSGGGGSSYELTQPPSVSVSPGQTASITCSGDRLGEKYVSWYQQKPGQSPILVIYQDNKWPSGIPERFSGSNSGNTATLTISGTQAMDEADYYCQAWDSSTVVFGGGTKLTVL

SEQ ID NO: 1411 - protein, 507 aa, artificial
  CDH19 14078  x I2C
QVQLVESGGGVVQPGGSLRLSCAASGFTFSRYGIHWVRQAPGKGLEWVAVIWYDGSNKYYADSVKGRFTISRDNSKNTLYLQMNSLRAEDSAVYYCARRAGIPGTTGYYYGMDVWGQGTTVTVSSGGGGSGGGGSGGGGSSYELTQPPSVSVSPGQTASITCSGDRLGEKYVSWYQQKPGQSPILVIYQDNKWPSGIPERFSGSNSGNTATLTISGTQAMDEADYYCQAWDSSTVVFGGGTKLTVLSGGGGSEVQLVESGGGLVQPGGSLKLSCAASGFTFNKYAMNWVRQAPGKGLEWVARIRSKYNNYATYYADSVKDRFTISRDDSKNTAYLQMNNLKTEDTAVYYCVRHGNFGNSYISYWAYWGQGTLVTVSSGGGGSGGGGSGGGGSQTVVTQEPSLTVSPGGTVTLTCGSSTGAVTSGNYPNWVQQKPGQAPRGLIGGTKFLAPGTPARFSGSLLGGKAALTLSGVQPEDEAEYYCVLWYSNRWVFGGGTKLTVLHHHHHH

SEQ ID NO: 1412 - protein, 5 aa, artificial
  CDR-H1 of CDH19 14080
RYGIH

SEQ ID NO: 1413 - protein, 17 aa, artificial
  CDR-H2 of CDH19 14080
VIWYDGSNKYYADSVKG

SEQ ID NO: 1414 - protein, 16 aa, artificial
  CDR-H3 of CDH19 14080
RAGIPGTTGYYYGMDV

SEQ ID NO: 1415 - protein, 11 aa, artificial
  CDR-L1 of CDH19 14080
SGDRLGEKYVY

SEQ ID NO: 1416 - protein, 7 aa, artificial
  CDR-L2 of CDH19 14080
QDNKWPS

SEQ ID NO: 1417 - protein, 9 aa, artificial
  CDR-L3 of CDH19 14080
QAWDSSTVV

SEQ ID NO: 1418 - DNA, 375 bp, artificial; identical to SEQ ID NO: 389
  VH of CDH19 14080

SEQ ID NO: 1419 - protein, 125 aa, artificial; identical to SEQ ID NO: 390
  VH of CDH19 14080

SEQ ID NO: 1420 - DNA, 318 bp, artificial
  VL of CDH19 14080
tcctatgagctgactcagccaccctcagtgtccgtgtccccaggacagacagccagcatcacctgctctggagatagattgggggagaaatatgtttactggtatcagcagaagccaggccagtcccctatactggtcatctatcaagataataagtggccctcagggatccctgagcgattctctggctccaactctgggaacacagccactctgaccatcagcgggacccaggctatggatgaggctgactattactgtcaggcgtgggacagcagcactgtggtattcggcggggggaccaagctgaccgtccta

SEQ ID NO: 1421 - protein, 246 aa, artificial
  VL of CDH19 14080
QVQLVESGGGVVQPGRSLRLSCAASGFTFSRYGIHWVRQAPGKGLEWVAVIWYDGSNKYYADSVKGRFTISRDNSKNTLYLLMNSLRAEDSAVYYCARRAGIPGTTGYYYGMDVWGQGTTVTVSSGGGGSGGGGSGGGGSSYELTQPPSVSVSPGQTASITCSGDRLGEKYVYWYQQKPGQSPILVIYQDNKWPSGIPERFSGSNSGNTATLTISGTQAMDEADYYCQAWDSSTVVFGGGTKLTVL

SEQ ID NO: 1422 - DNA, 738 bp, artificial
  VH-VL of CDH19 14080
caggtgcagctggtggagtctgggggaggcgtggtccagcctgggaggtccctgagactctcctgtgcagcgtctggattcaccttcagtcgctatggcatacactgggtccgccaggctccaggcaaggggctggagtgggtggcagttatatggtatgatggaagtaataaatactatgcagactccgtgaagggccgattcaccatctccagagacaattccaagaacacgctgtatctgctaatgaacagcctgagagccgaggactcggctgtgtattactgtgcgagaagggccggtatacctggaactacgggctactactatggtatggacgtctggggccaagggaccacggtcaccgtctcctcaggtggcggaggatctggcggaggtggaagcggaggcggcggatcttcctatgagctgactcagccaccctcagtgtccgtgtccccaggacagacagccagcatcacctgctctggagatagattgggggagaaatatgtttactggtatcagcagaagccaggccagtcccctatactggtcatctatcaagataataagtggccctcagggatccctgagcgattctctggctccaactctgggaacacagccactctgaccatcagcgggacccaggctatggatgaggctgactattactgtcaggcgtgggacagcagcactgtggtattcggcggggggaccaagctgaccgtccta

SEQ ID NO: 1423 - protein, 246 aa, artificial; identical to SEQ ID NO: 1421
  VH-VL of CDH19 14080

SEQ ID NO: 1424 - protein, 507 aa, artificial
  CDH19 14080 x I2C
QVQLVESGGGVVQPGRSLRLSCAASGFTFSRYGIHWVRQAPGKGLEWVAVIWYDGSNKYYADSVKGRFTISRDNSKNTLYLLMNSLRAEDSAVYYCARRAGIPGTTGYYYGMDVWGQGTTVTVSSGGGGSGGGGSGGGGSSYELTQPPSVSVSPGQTASITCSGDRLGEKYVYWYQQKPGQSPILVIYQDNKWPSGIPERFSGSNSGNTATLTISGTQAMDEADYYCQAWDSSTVVFGGGTKLTVLSGGGGSEVQLVESGGGLVQPGGSLKLSCAASGFTFNKYAMNWVRQAPGKGLEWVARIRSKYNNYATYYADSVKDRFTISRDDSKNTAYLQMNNLKTEDTAVYYCVRHGNFGNSYISYWAYWGQGTLVTVSSGGGGSGGGGSGGGGSQTVVTQEPSLTVSPGGTVTLTCGSSTGAVTSGNYPNWVQQKPGQAPRGLIGGTKFLAPGTPARFSGSLLGGKAALTLSGVQPEDEAEYYCVLWYSNRWVFGGGTKLTVLHHHHHH

SEQ ID NO: 1425 - protein, 5 aa, artificial
  CDR-H1 of CDH19 13591
SYSWS

SEQ ID NO: 1426 - protein, 16 aa, artificial
  CDR-H2 of CDH19 13591
YIYYSGSTNYNPSLKS

SEQ ID NO: 1427 - protein, 8 aa, artificial
  CDR-H3 of CDH19 13591
NWAFHFDY

SEQ ID NO: 1428 - protein, 14 aa, artificial
  CDR-L1 of CDH19 13591
TGSSSNIGTGYDVH

SEQ ID NO: 1429 - protein, 7 aa, artificial
  CDR-L2 of CDH19 13591
GNSNRPS

SEQ ID NO: 1430 - protein, 11 aa, artificial
  CDR-L3 of CDH19 13591
QSYDSSLSGWV

SEQ ID NO: 1431 - DNA, 348 bp, artificial; identical to SEQ ID NO: 1366
  VH of CDH19 13591

SEQ ID NO: 1432 - protein, 116 aa, artificial; identical to SEQ ID NO: 364
  VH of CDH19 13591

SEQ ID NO: 1433 - DNA, 333 bp, artificial
  VL of CDH19 13591
cagtctgtgctgacgcagccgccctcagtgtctggggccccagggcagagggtcaccatctcctgcactgggagcagctccaatatcgggacaggttatgatgtacactggtatcagcagcttccaggaacagcccccaaactcctcatccatggtaacagcaatcggccctcaggggtccctgaccgattctctggctccaagtctggcacctcagcctccctggccatcactgggctccaggctgaggatgaggctgattattactgccagtcctatgacagcagtctgagtggttgggtgttcggcggagggaccaggttgaccgtccta

SEQ ID NO: 1434 - protein, 111 aa, artificial; identical to SEQ ID NO: 1174
  VL of CDH19 13591

SEQ ID NO: 1435 - DNA, 726 bp, artificial
  VH-VL of CDH19 1591
caggtgcagctgcaggagtcgggcccaggactggtgaagccttcggagaccctgtccctcacctgcactgtctctggtggctccatcagtagttactcctggagctggatccggcagcccccagggaagggactggagtggattgggtatatctattacagtgggagcaccaactacaacccctccctcaagagtcgagtcaccatatcattagacacgtccaagaaccagttctccctgaagctgagctctgtgaccgctgcggacacggccgtgtattactgtgcgaggaactgggccttccactttgactactggggccagggaaccctggtcaccgtctctagtggtggcggaggatctggcggaggtggaagcggaggcggcggatctcagtctgtgctgacgcagccgccctcagtgtctggggccccagggcagagggtcaccatctcctgcactgggagcagctccaatatcgggacaggttatgatgtacactggtatcagcagcttccaggaacagcccccaaactcctcatccatggtaacagcaatcggccctcaggggtccctgaccgattctctggctccaagtctggcacctcagcctccctggccatcactgggctccaggctgaggatgaggctgattattactgccagtcctatgacagcagtctgagtggttgggtgttcggcggagggaccaggttgaccgtccta

SEQ ID NO: 1436 - protein, 242 aa, artificial; identical to SEQ ID NO: 1176
  VH-VL of CDH19 1591

SEQ ID NO: 1437 - protein, 503 aa, artificial; identical to SEQ ID NO: 1177
  CDH19 13591 x I2C

SEQ ID NO: 1438 - protein, 5 aa, artificial
  CDR-H1 of CDH19 14299
SYSWS

SEQ ID NO: 1439 - protein, 16 aa, artificial
  CDR-H2 of CDH19 14299
YIYYSGSTNYNPSLKS

SEQ ID NO: 1440 - protein, 8 aa, artificial
  CDR-H3 of CDH19 14299
NWAFHFDY

SEQ ID NO: 1441 - protein, 14 aa, artificial
  CDR-L1 of CDH19 14299
TGSSSNIGTGYDVH

SEQ ID NO: 1442 - protein, 7 aa, artificial
  CDR-L2 of CDH19 14299
GNSNRPS

SEQ ID NO: 1443 - protein, 11 aa, artificial
  CDR-L3 of CDH19 14299
QSYDSSLSGWV

SEQ ID NO: 1444 - DNA, 348 bp, artificial; identical to SEQ ID NO: 1366
  VH of CDH19 14299

SEQ ID NO: 1445 - protein, 116 aa, artificial; identical to SEQ ID NO: 364
  VH of CDH19 14299

SEQ ID NO: 1446 - DNA, 333 bp, artificial; identical to SEQ ID NO: 1433
  VL of CDH19 14299

SEQ ID NO: 1447 - protein, 111 aa, artificial; identical to SEQ ID NO: 1174
  VL of CDH19 14299

SEQ ID NO: 1448 - DNA, 726 bp, artificial; identical to SEQ ID NO: 1435
  VH-VL of CDH19 14299

SEQ ID NO: 1449 - protein, 242 aa, artificial; identical to SEQ ID NO: 1176
  VH-VL of CDH19 14299

SEQ ID NO: 1450 - protein, 503 aa, artificial; identical to SEQ ID NO: 1177
  CDH19 14299 x I2C

SEQ ID NO: 1451 - protein, 784 aa, artificial
  ckCDH19(1-43)::FLAG::ckCDH19(44-776)
MNCSTFLSLVLALVQLQLCSPTTQIFSAQKTDQSYTTIRRVKRDYKDDDDKGWVWEPLFVTEEETSTMPMYVGQLKSDLDKEDGSLQYILTGEGADSIFFINEHGKIYVRQKLDREKKSFYILRAQVINRKTRHPIEPDSEFIIKVRDINDHEPQFLDGPYVATVPEMSPEGTSVTQVTATDGDDPSYGNNARLLYSLIQGQPYFSVEPKTGVIRMTSQMDRETKDQYLVVIQAKDMVGQAGAFSATATVTINLSDVNDNPPKFQQRLYYLNVSEEAPVGTTVGRLLAEDSDIGENAAMNYFIEEDSSDVFGIITDRETQEGIIILKKRVDYESKRKHSVRVKAVNRYIDDRFLKEGPFEDITIVQISVVDADEPPVFTLESYVMEIAEGVVSGSLVGTVSARDLDNDDSSVRYSIVQGLHLKRLFSINEHNGTIITTEPLDREKASWHNITVTATETRNPEKISEANVYIQVLDVNDHAPEFSKYYETFVCENAVPGQLIQNISAVDKDDSAENHRFYFSLAQATNSSHFTVKDNQDNTAGIFTAGSGFSRKEQFYFFLPILILDNGSPPLTSTNTLTVTVCDCDTEVNTLYCRYGAFLYSIGLSTEALVAVLACLLILLVFFLAIIGIRQQRKKTLFSEKVEEFRENIVRYDDEGGGEEDTEAFDISALRTRAVLRTHKPRKKITTEIHSLYRQSLQVGPDSAIFRQFISEKLEEANTDPSVPPYDSLQTYAFEGTGSLAGSLSSLGSNTSDVDQNYEYLVGWGPPFKQLAGMYTSQRSTRD

SEQ ID NO: 1452 - protein, 784 aa, artificial
  huCDH19(1-43)::FLAG::hu(44-141)::ckCDH19(142-776)
MNCYLLLRFMLGIPLLWPCLGATENSQTKKVKQPVRSHLRVKRDYKDDDDKGWVWNQFFVPEEMNTTSHHIGQLRSDLDNGNNSFQYKLLGAGAGSTFIIDERTGDIYAIQKLDREERSLYILRAQVIDIATGRAVEPESEFVIKVSDINDHEPQFLDGPYVATVPEMSPEGTSVTQVTATDGDDPSYGNNARLLYSLIQGQPYFSVEPKTGVIRMTSQMDRETKDQYLVVIQAKDMVGQAGAFSATATVTINLSDVNDNPPKFQQRLYYLNVSEEAPVGTTVGRLLAEDSDIGENAAMNYFIEEDSSDVFGIITDRETQEGIIILKKRVDYESKRKHSVRVKAVNRYIDDRFLKEGPFEDITIVQISVVDADEPPVFTLESYVMEIAEGVVSGSLVGTVSARDLDNDDSSVRYSIVQGLHLKRLFSINEHNGTIITTEPLDREKASWHNITVTATETRNPEKISEANVYIQVLDVNDHAPEFSKYYETFVCENAVPGQLIQNISAVDKDDSAENHRFYFSLAQATNSSHFTVKDNQDNTAGIFTAGSGFSRKEQFYFFLPILILDNGSPPLTSTNTLTVTVCDCDTEVNTLYCRYGAFLYSIGLSTEALVAVLACLLILLVFFLAIIGIRQQRKKTLFSEKVEEFRENIVRYDDEGGGEEDTEAFDISALRTRAVLRTHKPRKKITTEIHSLYRQSLQVGPDSAIFRQFISEKLEEANTDPSVPPYDSLQTYAFEGTGSLAGSLSSLGSNTSDVDQNYEYLVGWGPPFKQLAGMYTSQRSTRD

SEQ ID NO: 1453 - protein, 784 aa, artificial
  ckCDH19(1-43)::FLAG::ckCDH19(44-141)::huCDH19(142-249)::ckCDH19(2 50-776)
MNCSTFLSLVLALVQLQLCSPTTQIFSAQKTDQSYTTIRRVKRDYKDDDDKGWVWEPLFVTEEETSTMPMYVGQLKSDLDKEDGSLQYILTGEGADSIFFINEHGKIYVRQKLDREKKSFYILRAQVINRKTRHPIEPDSEFIIKVRDINDNEPKFLDEPYEAIVPEMSPEGTLVIQVTASDADDPSSGNNARLLYSLLQGQPYFSVEPTTGVIRISSKMDRELQDEYWVIIQAKDMIGQPGALSGTTSVLIKLSDVNDNPPKFQQRLYYLNVSEEAPVGTTVGRLLAEDSDIGENAAMNYFIEEDSSDVFGIITDRETQEGIIILKKRVDYESKRKHSVRVKAVNRYIDDRFLKEGPFEDITIVQISVVDADEPPVFTLESYVMEIAEGVVSGSLVGTVSARDLDNDDSSVRYSIVQGLHLKRLFSINEHNGTIITTEPLDREKASWHNITVTATETRNPEKISEANVYIQVLDVNDHAPEFSKYYETFVCENAVPGQLIQNISAVDKDDSAENHRFYFSLAQATNSSHFTVKDNQDNTAGIFTAGSGFSRKEQFYFFLPILILDNGSPPLTSTNTLTVTVCDCDTEVNTLYCRYGAFLYSIGLSTEALVAVLACLLILLVFFLAIIGIRQQRKKTLFSEKVEEFRENIVRYDDEGGGEEDTEAFDISALRTRAVLRTHKPRKKITTEIHSLYRQSLQVGPDSAIFRQFISEKLEEANTDPSVPPYDSLQTYAFEGTGSLAGSLSSLGSNTSDVDQNYEYLVGWGPPFKQLAGMYTSQRSTRD

SEQ ID NO: 1454 - protein, 784 aa, artificial
  ckCDH19(1-43)::FLAG::ckCDH19(44-249)::huCDH19(250-364)::ckCDH19(3 65-776)
MNCSTFLSLVLALVQLQLCSPTTQIFSAQKTDQSYTTIRRVKRDYKDDDDKGWVWEPLFVTEEETSTMPMYVGQLKSDLDKEDGSLQYILTGEGADSIFFINEHGKIYVRQKLDREKKSFYILRAQVINRKTRHPIEPDSEFIIKVRDINDHEPQFLDGPYVATVPEMSPEGTSVTQVTATDGDDPSYGNNARLLYSLIQGQPYFSVEPKTGVIRMTSQMDRETKDQYLVVIQAKDMVGQAGAFSATATVTINLSDVNDNKPIFKESLYRLTVSESAPTGTSIGTIMAYDNDIGENAEMDYSIEEDDSQTFDIITNHETQEGIVILKKKVDFEHQNHYGIRAKVKNHHVPEQLMKYHTEASTTFIKIQVEDVDEPPVFTLESYVMEIAEGVVSGSLVGTVSARDLDNDDSSVRYSIVQGLHLKRLFSINEHNGTIITTEPLDREKASWHNITVTATETRNPEKISEANVYIQVLDVNDHAPEFSKYYETFVCENAVPGQLIQNISAVDKDDSAENHRFYFSLAQATNSSHFTVKDNQDNTAGIFTAGSGFSRKEQFYFFLPILILDNGSPPLTSTNTLTVTVCDCDTEVNTLYCRYGAFLYSIGLSTEALVAVLACLLILLVFFLAIIGIRQQRKKTLFSEKVEEFRENIVRYDDEGGGEEDTEAFDISALRTRAVLRTHKPRKKITTEIHSLYRQSLQVGPDSAIFRQFISEKLEEANTDPSVPPYDSLQTYAFEGTGSLAGSLSSLGSNTSDVDQNYEYLVGWGPPFKQLAGMYTSQRSTRD

SEQ ID NO: 1455 - protein, 779 aa, artificial
  ckCDH19(1-43)::FLAG::ckCDH19(44-364)::huCDH19(365-463)::ckCDH19(4 69-776)
MNCSTFLSLVLALVQLQLCSPTTQIFSAQKTDQSYTTIRRVKRDYKDDDDKGWVWEPLFVTEEETSTMPMYVGQLKSDLDKEDGSLQYILTGEGADSIFFINEHGKIYVRQKLDREKKSFYILRAQVINRKTRHPIEPDSEFIIKVRDINDHEPQFLDGPYVATVPEMSPEGTSVTQVTATDGDDPSYGNNARLLYSLIQGQPYFSVEPKTGVIRMTSQMDRETKDQYLVVIQAKDMVGQAGAFSATATVTINLSDVNDNPPKFQQRLYYLNVSEEAPVGTTVGRLLAEDSDIGENAAMNYFIEEDSSDVFGIITDRETQEGIIILKKRVDYESKRKHSVRVKAVNRYIDDRFLKEGPFEDITIVQISVVDADEPPLFLLPYYVFEVFEETPQGSFVGVVSATDPDNRKSPIRYSITRSKVFNINDNGTITTSNSLDREISAWYNLSITATEKYNIEQISSIPLYVQVLNINDHAPEFSKYYETFVCENAVPGQLIQNISAVDKDDSAENHRFYFSLAQATNSSHFTVKDNQDNTAGIFTAGSGFSRKEQFYFFLPILILDNGSPPLTSTNTLTVTVCDCDTEVNTLYCRYGAFLYSIGLSTEALVAVLACLLILLVFFLAIIGIRQQRKKTLFSEKVEEFRENIVRYDDEGGGEEDTEAFDISALRTRAVLRTHKPRKKITTEIHSLYRQSLQVGPDSAIFRQFISEKLEEANTDPSVPPYDSLQTYAFEGTGSLAGSLSSLGSNTSDVDQNYEYLVGWGPPFKQLAGMYTSQRSTRD

SEQ ID NO: 1456 - protein, 785 aa, artificial
  (1-43)::FLAG::ckCDH19(44-468)::huCDH19(464-772)
MNCSTFLSLVLALVQLQLCSPTTQIFSAQKTDQSYTTIRRVKRDYKDDDDKGWVWEPLFVTEEETSTMPMYVGQLKSDLDKEDGSLQYILTGEGADSIFFINEHGKIYVRQKLDREKKSFYILRAQVINRKTRHPIEPDSEFIIKVRDINDHEPQFLDGPYVATVPEMSPEGTSVTQVTATDGDDPSYGNNARLLYSLIQGQPYFSVEPKTGVIRMTSQMDRETKDQYLVVIQAKDMVGQAGAFSATATVTINLSDVNDNPPKFQQRLYYLNVSEEAPVGTTVGRLLAEDSDIGENAAMNYFIEEDSSDVFGIITDRETQEGIIILKKRVDYESKRKHSVRVKAVNRYIDDRFLKEGPFEDITIVQISVVDADEPPVFTLESYVMEIAEGVVSGSLVGTVSARDLDNDDSSVRYSIVQGLHLKRLFSINEHNGTIITTEPLDREKASWHNITVTATETRNPEKISEANVYIQVLDVNDHAPEFSQYYETYVCENAGSGQVIQTISAVDRDESIEEHHFYFNLSVEDTNNSSFTIIDNQDNTAVILTNRTGFNLQEEPVFYISILIADNGIPSLTSTNTLTIHVCDCGDSGSTQTCQYQELVLSMGFKTEVIIAILICIMIIFGFIFLTLGLKQRRKQILFPEKSEDFRENIFQYDDEGGGEEDTEAFDIAELRSSTIMRERKTRKTTSAEIRSLYRQSLQVGPDSAIFRKFILEKLEEANTDPCAPPFDSLQTYAFEGTGSLAGSLSSLESAVSDQDESYDYLNELGPRFKRLACMFGSAVQSNN

SEQ ID NO: 1457 - protein, 780 aa, artificial
  rhCDH19(1-43)::FLAG::rhCDH19(44-772)
MNCYLLLPFMLGIPLLWPCLGATENSQTKKVQQPVGSHLRVKRDYKDDDDKGWVWNQFFVPEEMNTTSHHVGRLRSDLDNGNNSFQYKLLGAGAGSTFIIDERTGDIYAIEKLDREERSLYILRAQVIDITTGRAVEPESEFVIKVSDINDNEPKFLDEPYEAIVPEMSPEGTLVIQVTASDADDPSSGNNARLLYSLLQGQPYFSVEPTTGVIRISSKMDRELQDEYWVIIQAKDMIGQPGALSGTTSVLIKLSDVNDNKPIFKESLYRLTVSESAPTGTSIGTIMAYDNDIGENAEMDYSIEEDDSQTFDIITNHETQEGIVILKKKVNFEHQNHYGIRAKVKNHHVDEQLMKYHTEASTTFIKIQVEDVDEPPLFLLPYYIFEIFEETPQGSFVGVVSATDPDNRKSPIRYSITRSKVFNIDDNGTITTTNSLDREISAWYNLSITATEKYNIEQISSIPVYVQVLNINDHAPEFSQYYESYVCENAGSGQVIQTISAVDRDESIEEHHFYFNLSVEDTNSSSFTIIDNQDNTAVILTNRTGFNLQEEPIFYISILIADNGIPSLTSTNTLTIHVCDCDDSGSTQTCQYQELMLSMGFKTEVIIAILICIMVIFGFIFLTLGLKQRRKQILFPEKSEDFRENIFRYDDEGGGEEDTEAFDVAALRSSTIMRERKTRKTTSAEIRSLYRQSLQVGPDSAIFRKFILEKLEEADTDPCAPPFDSLQTYAFEGTGSLAGSLSSLESAVSDQDESYDYLNELGPRFKRLACMFGSAVQSNN

SEQ ID NO: 1458 - protein, 723 aa, artificial
  caCDH19(1-42)::FLAG::caCDH19(43-770)
QFFVPEEMNKTDYHIGQLRSDLDNGNNSFQYKLLGAGAGSIFVIDERTGDIYAIQKLDREERSLYTLRAQVIDSTTGRAVEPESEFVIRVSDINDNEPKFLDEPYEAIVPEMSPEGTLVIQVTATDADDPASGNNARLLYSLLQGQPYFSIEPTTGVIRISSKMDRELQDEYWVIIQAKDMIGLPGALSGTTSVLIKLSDVNDNKPIFKERLYRLTVSESAPTGTSIGRIMAYDNDIGENAEMDYSIEDDSQTFDIITNNETQEGIVILKKKVDFEHQNHYLIRANVKNRHVAEHLMEYHVEASTTFVRVQVEDEDEPPVFLLPYYLFEILEESPHGSFVGMVSATDPDQRKSPIRYSITRSKVFSIDDNGTIITTNPLDREISAWYNLSITATEKYNVQQISAVPVYVQVLNINDHAPEFSEYYDSYVCENAGSGQVIQTISAVDRDESVEDHHFYFNLSVEDTKNSSFIIIDNEDNTAVILTNRTGFSLQEEPVFYISVLIADNGIPSLTSTNTLTIHICDCDDYGSTQTCRDKDLLLSMGFRTEVILAILISIMIIFGFIFLILGLKQRRKPTLFPEKGEDFRENIFRYDDEGGGEEDTEAFDIVQLRSSTIMRERKTRKTAAAEIRSLYRQSLQVGPDSAIFRKFILEKLEEANTDPCAPPFDSLQTYAFEGTGSLAGSLSSLGSAVSDQDENYDYLNELGPRFKRLACMFGSAMQSNN

SEQ ID NO: 1459 - protein, 779 aa, artificial
  rhCDH19(1-43):FLAG::rhCDH19(44-141)::caCDH19(141-770)
MNCYLLLPFMLGIPLLWPCLGATENSQTKKVQQPVGSHLRVKRDYKDDDDKGWVWNQFFVPEEMNTTSHHVGRLRSDLDNGNNSFQYKLLGAGAGSTFIIDERTGDIYAIEKLDREERSLYILRAQVIDITTGRAVEPESEFVIKVSDINDNEPKFLDEPYEAIVPEMSPEGTLVIQVTATDADDPASGNNARLLYSLLQGQPYFSIEPTTGVIRISSKMDRELQDEYWVIIQAKDMIGLPGALSGTTSVLIKLSDVNDNKPIFKERLYRLTVSESAPTGTSIGRIMAYDNDIGENAEMDYSIEDDSQTFDIITNNETQEGIVILKKKVDFEHQNHYLIRANVKNRHVAEHLMEYHVEASTTFVRVQVEDEDEPPVFLLPYYLFEILEESPHGSFVGMVSATDPDQRKSPIRYSITRSKVFSIDDNGTIITTNPLDREISAWYNLSITATEKYNVQQISAVPVYVQVLNINDHAPEFSEYYDSYVCENAGSGQVIQTISAVDRDESVEDHHFYFNLSVEDTKNSSFIIIDNEDNTAVILTNRTGFSLQEEPVFYISVLIADNGIPSLTSTNTLTIHICDCDDYGSTQTCRDKDLLLSMGFRTEVILAILISIMIIFGFIFLILGLKQRRKPTLFPEKGEDFRENIFRYDDEGGGEEDTEAFDIVQLRSSTIMRERKTRKTAAAEIRSLYRQSLQVGPDSAIFRKFILEKLEEANTDPCAPPFDSLQTYAFEGTGSLAGSLSSLGSAVSDQDENYDYLNELGPRFKRLACMFGSAMQSNN

SEQ ID NO: 1460 - protein, 779 aa, artificial
  rhCDH19(1-43)::FLAG::rhCDH19(44-65)::caCDH19(65-770)
MNCYLLLPFMLGIPLLWPCLGATENSQTKKVQQPVGSHLRVKRDYKDDDDKGWVWNQFFVPEEMNTTSHHVGRLRSDLDNGNNSFQYKLLGAGAGSIFVIDERTGDIYAIQKLDREERSLYTLRAQVIDSTTGRAVEPESEFVIRVSDINDNEPKFLDEPYEAIVPEMSPEGTLVIQVTATDADDPASGNNARLLYSLLQGQPYFSIEPTTGVIRISSKMDRELQDEYWVIIQAKDMIGLPGALSGTTSVLIKLSDVNDNKPIFKERLYRLTVSESAPTGTSIGRIMAYDNDIGENAEMDYSIEDDSQTFDIITNNETQEGIVILKKKVDFEHQNHYLIRANVKNRHVAEHLMEYHVEASTTFVRVQVEDEDEPPVFLLPYYLFEILEESPHGSFVGMVSATDPDQRKSPIRYSITRSKVFSIDDNGTIITTNPLDREISAWYNLSITATEKYNVQQISAVPVYVQVLNINDHAPEFSEYYDSYVCENAGSGQVIQTISAVDRDESVEDHHFYFNLSVEDTKNSSFIIIDNEDNTAVILTNRTGFSLQEEPVFYISVLIADNGIPSLTSTNTLTIHICDCDDYGSTQTCRDKDLLLSMGFRTEVILAILISIMIIFGFIFLILGLKQRRKPTLFPEKGEDFRENIFRYDDEGGGEEDTEAFDIVQLRSSTIMRERKTRKTAAAEIRSLYRQSLQVGPDSAIFRKFILEKLEEANTDPCAPPFDSLQTYAFEGTGSLAGSLSSLGSAVSDQDENYDYLNELGPRFKRLACMFGSAMQSNN

SEQ ID NO: 1461 - protein, 778 aa, artificial
  caCDH19(1-43)::FLAG::caCDH19(44-87)::rhCDH19(89-114)::caCDH19(115 -770)
MNYCFLLPLMLGIPLIWPCFTASESSKTEVKHQAGSHLRVKRDYKDDDDKGWMWNQFFVPEEMNKTDYHIGQLRSDLDNGNNSFQYKLLGAGAGSTFIIDERTGDIYAIEKLDREERSLYILRAQVIDSTTGRAVEPESEFVIRVSDINDNEPKFLDEPYEAIVPEMSPEGTLVIQVTATDADDPASGNNARLLYSLLQGQPYFSIEPTTGVIRISSKMDRELQDEYWVIIQAKDMIGLPGALSGTTSVLIKLSDVNDNKPIFKERLYRLTVSESAPTGTSIGRIMAYDNDIGENAEMDYSIEDDSQTFDIITNNETQEGIVILKKKVDFEHQNHYLIRANVKNRHVAEHLMEYHVEASTTFVRVQVEDEDEPPVFLLPYYLFEILEESPHGSFVGMVSATDPDQRKSPIRYSITRSKVFSIDDNGTIITTNPLDREISAWYNLSITATEKYNVQQISAVPVYVQVLNINDHAPEFSEYYDSYVCENAGSGQVIQTISAVDRDESVEDHHFYFNLSVEDTKNSSFIIIDNEDNTAVILTNRTGFSLQEEPVFYISVLIADNGIPSLTSTNTLTIHICDCDDYGSTQTCRDKDLLLSMGFRTEVILAILISIMIIFGFIFLILGLKQRRKPTLFPEKGEDFRENIFRYDDEGGGEEDTEAFDIVQLRSSTIMRERKTRKTAAAEIRSLYRQSLQVGPDSAIFRKFILEKLEEANTDPCAPPFDSLQTYAFEGTGSLAGSLSSLGSAVSDQDENYDYLNELGPRFKRLACMFGSAMQSNN

SEQ ID NO: 1462 - protein, 778 aa, artificial
  caCDH19(1-43)::FLAG::caCDH19(44-120)::rhCDH19(122-137)::caCDH19(1 37-770)
MNYCFLLPLMLGIPLIWPCFTASESSKTEVKHQAGSHLRVKRDYKDDDDKGWMWNQFFVPEEMNKTDYHIGQLRSDLDNGNNSFQYKLLGAGAGSIFVIDERTGDIYAIQKLDREERSLYTLRAQVIDITTGRAVEPESEFVIKVSDINDNEPKFLDEPYEAIVPEMSPEGTLVIQVTATDADDPASGNNARLLYSLLQGQPYFSIEPTTGVIRISSKMDRELQDEYWVIIQAKDMIGLPGALSGTTSVLIKLSDVNDNKPIFKERLYRLTVSESAPTGTSIGRIMAYDNDIGENAEMDYSIEDDSQTFDIITNNETQEGIVILKKKVDFEHQNHYLIRANVKNRHVAEHLMEYHVEASTTFVRVQVEDEDEPPVFLLPYYLFEILEESPHGSFVGMVSATDPDQRKSPIRYSITRSKVFSIDDNGTIITTNPLDREISAWYNLSITATEKYNVQQISAVPVYVQVLNINDHAPEFSEYYDSYVCENAGSGQVIQTISAVDRDESVEDHHFYFNLSVEDTKNSSFIIIDNEDNTAVILTNRTGFSLQEEPVFYISVLIADNGIPSLTSTNTLTIHICDCDDYGSTQTCRDKDLLLSMGFRTEVILAILISIMIIFGFIFLILGLKQRRKPTLFPEKGEDFRENIFRYDDEGGGEEDTEAFDIVQLRSSTIMRERKTRKTAAAEIRSLYRQSLQVGPDSAIFRKFILEKLEEANTDPCAPPFDSLQTYAFEGTGSLAGSLSSLGSAVSDQDENYDYLNELGPRFKRLACMFGSAMQSNN

SEQ ID NO: 1463 - protein, 780 aa, artificial
  rhCDH19(1-43)::FLAG::rhCDH19(44-141)::raCDH19(140-247)::rhCDH19(2 50-772)
MNCYLLLPFMLGIPLLWPCLGATENSQTKKVQQPVGSHLRVKRDYKDDDDKGWVWNQFFVPEEMNTTSHHVGRLRSDLDNGNNSFQYKLLGAGAGSTFIIDERTGDIYAIEKLDREERSLYILRAQVIDITTGRAVEPESEFVIKVSDINDNEPRFLDEPYEAIVPEMSPEGTFVIKVTANDADDPTSGYHARILYNLEQGQPYFSVEPTTGVIRISSKMDRELQDTYCVIIQAKDMLGQPGALSGTTTISIKLSDINDNKPIFKESLYRLTVSESAPTGTSIGTIMAYDNDIGENAEMDYSIEEDDSQTFDIITNHETQEGIVILKKKVNFEHQNHYGIRAKVKNHHVDEQLMKYHTEASTTFIKIQVEDVDEPPLFLLPYYIFEIFEETPQGSFVGVVSATDPDNRKSPIRYSITRSKVFNIDDNGTITTTNSLDREISAWYNLSITATEKYNIEQISSIPVYVQVLNINDHAPEFSQYYESYVCENAGSGQVIQTISAVDRDESIEEHHFYFNLSVEDTNSSSFTIIDNQDNTAVILTNRTGFNLQEEPIFYISILIADNGIPSLTSTNTLTIHVCDCDDSGSTQTCQYQELMLSMGFKTEVIIAILICIMVIFGFIFLTLGLKQRRKQILFPEKSEDFRENIFRYDDEGGGEEDTEAFDVAALRSSTIMRERKTRKTTSAEIRSLYRQSLQVGPDSAIFRKFILEKLEEADTDPCAPPFDSLQTYAFEGTGSLAGSLSSLESAVSDQDESYDYLNELGPRFKRLACMFGSAVQSNN

SEQ ID NO: 1464 - protein, 778 aa, artificial
  raCDH19(1-43)::FLAG::raCDH19(44-770)
MNHYFLKYWILMVPLIWPCLKVAETLKIEKAQRAVPSLGRAKRDYKDDDDKGWVWKQFVVPEEMDTIQHVGRLRSDLDNGNNSFQYKLLGTGDGSFSIDEKTGDIFAMQKLDREKQSLYILRAQVIDTTIGKAVEPESEFVIRVSDVNDNEPRFLDEPYEAIVPEMSPEGTFVIKVTANDADDPTSGYHARILYNLEQGQPYFSVEPTTGVIRISSKMDRELQDTYCVIIQAKDMLGQPGALSGTTTISIKLSDINDNKPIFKESFYRFTISESAPSGTTIGKIMAYDDDIGENAEMDYSIEDDESQIFDIVIDNETQEGIVILKKKVDFEHQNHYGIRVKVKNCHVDEELAPAHVNASTTYIKVQVEDEDEPPTFLLPYYIFEIPEGKPYGTMVGTVSAVDPDRRQSPMRYSLIGSKMFDINGNGTIVTTNLLDREVSAWYNLSVTATETYNVQQISSAHVYVQVLNINDHAPEFSQLYETYVCENAESGEIIQTISAIDRDESIEDHHFYFNHSVEDTNNSSFILTDNQDNTAVILSNRAGFSLKEETVFYMIILIADNGIPPLTSTNTLTIQVCDCGDSRSTETCTSKELLFIMGFKAEAIIAIVICVMVIFGFIFLILALKQRRKETLFPEKTEDFRENIFCYDDEGGGEEDSEAFDIIELRQSTVMRERKPRKSRSAEIRSLYRQSLQVGPDSAIFRKFILEKLEEANTDSSAPPFDSLQTFAYEGTGSSAGSLSSLGSSVTDQEDDFDYLNDLGPCFKRLANMFGSAVQPDN

SEQ ID NO: 1465 - protein, 778 aa, artificial
  (1-43)::FLAG::muCDH19(44-323)::raCDH19(324-327)::muCDH19(328-770)
MNYCFLKHWILMIPLLWPCLKVSETLKAEKARRTVPSTWRAKRDYKDDDDKAWVWRPFVVLEEMDDIQCVGKLRSDLDNGNNSFQYKLLGIGAGSFSINERTGEICAIQKLDREEKSLYILRAQVIDTTIGKAVETESEFVIRVLDINDNEPRFLDEPYEAIVPEMSPEGTFVIKVTANDADDPSTGYHARILYNLERGQPYFSVEPTTGVIRISSKMDRELQDTYCVIIQAKDMLGQPGALSGTTTVSIKLSDINDNKPIFKESFYRFTISESAPIGTSIGKIMAYDDDIGENAEMEYSIEDDDSKIFDIIIDNDTQEGIVILKKKVDFEHQNHYGIRAKVKNCHVDEELAPAHVNASTTYIKVQVEDEDEPPVFLLPYYILEIPEGKPYGTIVGTVSATDPDRRQSPMRYYLTGSKMFDINDNGTIITTNMLDREVSAWYNLTVTATETYNVQQISSAHVYVQVFNINDNAPEFSQFYETYVCENAESGEIVQIISAIDRDESIEDHHFYFNHSLEDTNNSSFMLTDNQDNTAVILSNRTGFNLKEEPVFYMIILIADNGIPSLTSTNTLTIQVCDCGDSRNTETCANKGLLFIMGFRTEAIIAIMICVMVIFGFFFLILALKQRRKETLFPEKTEDFRENIFCYDDEGGGEEDSEAFDIVELRQSTVMRERKPQRSKSAEIRSLYRQSLQVGPDSAIFRKFILEKLEEANTDPCAPPFDSLQTFAYEGTGSSAGSLSSLASRDTDQEDDFDYLNDLGPRFKRLASMFGSAVQPNN

SEQ ID NO: 1466 - protein, 778 aa, artificial
  muCDH19(1-43)::FLAG::muCDH19(44-770)::raCDH19(290,299,308)
MNYCFLKHWILMIPLLWPCLKVSETLKAEKARRTVPSTWRAKRDYKDDDDKAWVWRPFVVLEEMDDIQCVGKLRSDLDNGNNSFQYKLLGIGAGSFSINERTGEICAIQKLDREEKSLYILRAQVIDTTIGKAVETESEFVIRVLDINDNEPRFLDEPYEAIVPEMSPEGTFVIKVTANDADDPSTGYHARILYNLERGQPYFSVEPTTGVIRISSKMDRELQDTYCVIIQAKDMLGQPGALSGTTTVSIKLSDINDNKPIFKESFYRFTISESAPIGTSIGKIMAYDDDIGENAEMEYSIEDDDSKIFDIIIDNDTQEGIVILKKKVDFEQQSYYGIRAKVKNCHVDEELAPAHVNASTTYIKVQVEDEDEPPVFLLPYYILEIPEGKPYGTIVGTVSATDPDRRQSPMRYYLTGSKMFDINDNGTIITTNMLDREVSAWYNLTVTATETYNVQQISSAHVYVQVFNINDNAPEFSQFYETYVCENAESGEIVQIISAIDRDESIEDHHFYFNHSLEDTNNSSFMLTDNQDNTAVILSNRTGFNLKEEPVFYMIILIADNGIPSLTSTNTLTIQVCDCGDSRNTETCANKGLLFIMGFRTEAIIAIMICVMVIFGFFFLILALKQRRKETLFPEKTEDFRENIFCYDDEGGGEEDSEAFDIVELRQSTVMRERKPQRSKSAEIRSLYRQSLQVGPDSAIFRKFILEKLEEANTDPCAPPFDSLQTFAYEGTGSSAGSLSSLASRDTDQEDDFDYLNDLGPRFKRLASMFGSAVQPNN

SEQ ID NO: 1467 - protein, 778 aa, artificial
  muCDH19(1-43)::FLAG::muCDH19(44-770)::huCDH19(271)
MNYCFLKHWILMIPLLWPCLKVSETLKAEKARRTVPSTWRAKRDYKDDDDKAWVWRPFVVLEEMDDIQCVGKLRSDLDNGNNSFQYKLLGIGAGSFSINERTGEICAIQKLDREEKSLYILRAQVIDTTIGKAVETESEFVIRVLDINDNEPRFLDEPYEAIVPEMSPEGTFVIKVTANDADDPSTGYHARILYNLERGQPYFSVEPTTGVIRISSKMDRELQDTYCVIIQAKDMLGQPGALSGTTTVSIKLSDINDNKPIFKESFYRFTISESAPTGTSIGKIMAYDDDIGENAEMEYSIEDDDSKIFDIIIDNDTQEGIVILKKKVDFEQQSYYGIRAKVKNCHVDEELAPAHVNASTTYIKVQVEDEDEPPVFLLPYYILEIPEGKPYGTIVGTVSATDPDRRQSPMRYYLTGSKMFDINDNGTIITTNMLDREVSAWYNLTVTATETYNVQQISSAHVYVQVFNINDNAPEFSQFYETYVCENAESGEIVQIISAIDRDESIEDHHFYFNHSLEDTNNSSFMLTDNQDNTAVILSNRTGFNLKEEPVFYMIILIADNGIPSLTSTNTLTIQVCDCGDSRNTETCANKGLLFIMGFRTEAIIAIMICVMVIFGFFFLILALKQRRKETLFPEKTEDFRENIFCYDDEGGGEEDSEAFDIVELRQSTVMRERKPQRSKSAEIRSLYRQSLQVGPDSAIFRKFILEKLEEANTDPCAPPFDSLQTFAYEGTGSSAGSLSSLASRDTDQEDDFDYLNDLGPRFKRLASMFGSAVQPNN

1. An isolated multispecific antibody construct comprising a first human binding domain capable of binding to human CDH19 on the surface of a target cell and a second domain capable of binding to human CD3 on the surface of a T cell.

2. The antibody construct according to claim 1, wherein the first binding domain comprises a VH region comprising CDR-H1, CDR-H2 and CDR-H3 and a VL region comprising CDR-L1, CDR-L2 and CDR-L3 selected from the group consisting of:
(a) CDR-H1 as depicted in SEQ ID NO: 52, CDR-H2 as depicted in SEQ ID NO: 53, CDR-H3 as depicted in SEQ ID NO: 54, CDR-L1 as depicted in SEQ ID NO: 220, CDR-L2 as depicted in SEQ ID NO: 221 and CDR-L3 as depicted in SEQ ID NO: 222,
CDR-H1 as depicted in SEQ ID NO: 82, CDR-H2 as depicted in SEQ ID NO: 83, CDR-H3 as depicted in SEQ ID NO: 84, CDR-L1 as depicted in SEQ ID NO: 250, CDR-L2 as depicted in SEQ ID NO: 251 and CDR-L3 as depicted in SEQ ID NO: 252,
CDR-H1 as depicted in SEQ ID NO: 82, CDR-H2 as depicted in SEQ ID NO: 83, CDR-H3 as depicted in SEQ ID NO: 84, CDR-L1 as depicted in SEQ ID NO: 250, CDR-L2 as depicted in SEQ ID NO: 251 and CDR-L3 as depicted in SEQ ID NO: 927,
CDR-H1 as depicted in SEQ ID NO: 82, CDR-H2 as depicted in SEQ ID NO: 83, CDR-H3 as depicted in SEQ ID NO: 909, CDR-L1 as depicted in SEQ ID NO: 250, CDR-L2 as depicted in SEQ ID NO: 251 and CDR-L3 as depicted in SEQ ID NO: 927,
CDR-H1 as depicted in SEQ ID NO: 52, CDR-H2 as depicted in SEQ ID NO: 53, CDR-H3 as depicted in SEQ ID NO: 54, CDR-L1 as depicted in SEQ ID NO: 220, CDR-L2 as depicted in SEQ ID NO: 221 and CDR-L3 as depicted in SEQ ID NO: 926,
CDR-H1 as depicted in SEQ ID NO: 52, CDR-H2 as depicted in SEQ ID NO: 53, CDR-H3 as depicted in SEQ ID NO: 904, CDR-L1 as depicted in SEQ ID NO: 220, CDR-L2 as depicted in SEQ ID NO: 221 and CDR-L3 as depicted in SEQ ID NO: 926,
CDR-H1 as depicted in SEQ ID NO: 1126, CDR-H2 as depicted in SEQ ID NO: 1127, CDR-H3 as depicted in SEQ ID NO: 1128, CDR-L1 as depicted in SEQ ID NO: 1129, CDR-L2 as depicted in SEQ ID NO: 1130 and CDR-L3 as depicted in SEQ ID NO: 1131,
CDR-H1 as depicted in SEQ ID NO: 1165, CDR-H2 as depicted in SEQ ID NO: 1166, CDR-H3 as depicted in SEQ ID NO: 1167, CDR-L1 as depicted in SEQ ID NO: 1168, CDR-L2 as depicted in SEQ ID NO: 1169 and CDR-L3 as depicted in SEQ ID NO: 1170,
CDR-H1 as depicted in SEQ ID NO: 1334, CDR-H2 as depicted in SEQ ID NO: 1335, CDR-H3 as depicted in SEQ ID NO: 1336, CDR-L1 as depicted in SEQ ID NO: 1337, CDR-L2 as depicted in SEQ ID NO: 1338 and CDR-L3 as depicted in SEQ ID NO: 1339,
CDR-H1 as depicted in SEQ ID NO: 1347, CDR-H2 as depicted in SEQ ID NO: 1348, CDR-H3 as depicted in SEQ ID NO: 1349, CDR-L1 as depicted in SEQ ID NO: 1350, CDR-L2 as depicted in SEQ ID NO: 1351 and CDR-L3 as depicted in SEQ ID NO: 1352, and
CDR-H1 as depicted in SEQ ID NO: 1360 CDR-H2 as depicted in SEQ ID NO: 1361, CDR-H3 as depicted in SEQ ID NO: 1362, CDR-L1 as depicted in SEQ ID NO: 1363, CDR-L2 as depicted in SEQ ID NO: 1364 and CDR-L3 as depicted in SEQ ID NO: 1365,
CDR-H1 as depicted in SEQ ID NO: 1425 CDR-H2 as depicted in SEQ ID NO: 1426, CDR-H3 as depicted in SEQ ID NO: 1427, CDR-L1 as depicted in SEQ ID NO: 1428, CDR-L2 as depicted in SEQ ID NO: 1429 and CDR-L3 as depicted in SEQ ID NO: 1430,
CDR-H1 as depicted in SEQ ID NO: 1438 CDR-H2 as depicted in SEQ ID NO: 1439, CDR-H3 as depicted in SEQ ID NO: 1440, CDR-L1 as depicted in SEQ ID NO: 1441, CDR-L2 as depicted in SEQ ID NO: 1442 and CDR-L3 as depicted in SEQ ID NO: 1443;
(b) CDR-H1 as depicted in SEQ ID NO: 124, CDR-H2 as depicted in SEQ ID NO: 125, CDR-H3 as depicted in SEQ ID NO: 126, CDR-L1 as depicted in SEQ ID NO: 292, CDR-L2 as depicted in SEQ ID NO: 293 and CDR-L3 as depicted in SEQ ID NO: 294,
CDR-H1 as depicted in SEQ ID NO: 130, CDR-H2 as depicted in SEQ ID NO: 131, CDR-H3 as depicted in SEQ ID NO: 132, CDR-L1 as depicted in SEQ ID NO: 298, CDR-L2 as depicted in SEQ ID NO: 299 and CDR-L3 as depicted in SEQ ID NO: 300,
CDR-H1 as depicted in SEQ ID NO: 136, CDR-H2 as depicted in SEQ ID NO: 137, CDR-H3 as depicted in SEQ ID NO: 138, CDR-L1 as depicted in SEQ ID NO: 304, CDR-L2 as depicted in SEQ ID NO: 305 and CDR-L3 as depicted in SEQ ID NO: 306,
CDR-H1 as depicted in SEQ ID NO: 142, CDR-H2 as depicted in SEQ ID NO: 143, CDR-H3 as depicted in SEQ ID NO: 144, CDR-L1 as depicted in SEQ ID NO: 310, CDR-L2 as depicted in SEQ ID NO: 311 and CDR-L3 as depicted in SEQ ID NO: 312,
CDR-H1 as depicted in SEQ ID NO: 148, CDR-H2 as depicted in SEQ ID NO: 149, CDR-H3 as depicted in SEQ ID NO: 150, CDR-L1 as depicted in SEQ ID NO: 316, CDR-L2 as depicted in SEQ ID NO: 317 and CDR-L3 as depicted in SEQ ID NO: 318,
CDR-H1 as depicted in SEQ ID NO: 166, CDR-H2 as depicted in SEQ ID NO: 167, CDR-H3 as depicted in SEQ ID NO: 168, CDR-L1 as depicted in SEQ ID NO: 334, CDR-L2 as depicted in SEQ ID NO: 335 and CDR-L3 as depicted in SEQ ID NO: 336,
CDR-H1 as depicted in SEQ ID NO: 124, CDR-H2 as depicted in SEQ ID NO: 125, CDR-H3 as depicted in SEQ ID NO: 915, CDR-L1 as depicted in SEQ ID NO: 292, CDR-L2 as depicted in SEQ ID NO: 293 and CDR-L3 as depicted in SEQ ID NO: 294,
CDR-H1 as depicted in SEQ ID NO: 124, CDR-H2 as depicted in SEQ ID NO: 125, CDR-H3 as depicted in SEQ ID NO: 915, CDR-L1 as depicted in SEQ ID NO: 292, CDR-L2 as depicted in SEQ ID NO: 293 and CDR-L3 as depicted in SEQ ID NO: 928,
CDR-H1 as depicted in SEQ ID NO: 124, CDR-H2 as depicted in SEQ ID NO: 125, CDR-H3 as depicted in SEQ ID NO: 915, CDR-L1 as depicted in SEQ ID NO: 292, CDR-L2 as depicted in SEQ ID NO: 293 and CDR-L3 as depicted in SEQ ID NO: 929,
CDR-H1 as depicted in SEQ ID NO: 166, CDR-H2 as depicted in SEQ ID NO: 167, CDR-H3 as depicted in SEQ ID NO: 168, CDR-L1 as depicted in SEQ ID NO: 334, CDR-L2 as depicted in SEQ ID NO: 335 and CDR-L3 as depicted in SEQ ID NO: 336,
CDR-H1 as depicted in SEQ ID NO: 166, CDR-H2 as depicted in SEQ ID NO: 167, CDR-H3 as depicted in SEQ ID NO: 168, CDR-L1 as depicted in SEQ ID NO: 334, CDR-L2 as depicted in SEQ ID NO: 335 and CDR-L3 as depicted in SEQ ID NO: 942,
CDR-H1 as depicted in SEQ ID NO: 166, CDR-H2 as depicted in SEQ ID NO: 167, CDR-H3 as depicted in SEQ ID NO: 168, CDR-L1 as depicted in SEQ ID NO: 334, CDR-L2 as depicted in SEQ ID NO: 335 and CDR-L3 as depicted in SEQ ID NO: 943,
CDR-H1 as depicted in SEQ ID NO: 148, CDR-H2 as depicted in SEQ ID NO: 149, CDR-H3 as depicted in SEQ ID NO: 150, CDR-L1 as depicted in SEQ ID NO: 316, CDR-L2 as depicted in SEQ ID NO: 317 and CDR-L3 as depicted in SEQ ID NO: 318,
CDR-H1 as depicted in SEQ ID NO: 148, CDR-H2 as depicted in SEQ ID NO: 149, CDR-H3 as depicted in SEQ ID NO: 150, CDR-L1 as depicted in SEQ ID NO: 316, CDR-L2 as depicted in SEQ ID NO: 317 and CDR-L3 as depicted in SEQ ID NO: 937,
CDR-H1 as depicted in SEQ ID NO: 148, CDR-H2 as depicted in SEQ ID NO: 149, CDR-H3 as depicted in SEQ ID NO: 150, CDR-L1 as depicted in SEQ ID NO: 316, CDR-L2 as depicted in SEQ ID NO: 317 and CDR-L3 as depicted in SEQ ID NO: 938,
CDR-H1 as depicted in SEQ ID NO: 148, CDR-H2 as depicted in SEQ ID NO: 149, CDR-H3 as depicted in SEQ ID NO: 919, CDR-L1 as depicted in SEQ ID NO: 316, CDR-L2 as depicted in SEQ ID NO: 317 and CDR-L3 as depicted in SEQ ID NO: 938,
CDR-H1 as depicted in SEQ ID NO: 142, CDR-H2 as depicted in SEQ ID NO: 143, CDR-H3 as depicted in SEQ ID NO: 144, CDR-L1 as depicted in SEQ ID NO: 310, CDR-L2 as depicted in SEQ ID NO: 311 and CDR-L3 as depicted in SEQ ID NO: 935,
CDR-H1 as depicted in SEQ ID NO: 142, CDR-H2 as depicted in SEQ ID NO: 143, CDR-H3 as depicted in SEQ ID NO: 918, CDR-L1 as depicted in SEQ ID NO: 310, CDR-L2 as depicted in SEQ ID NO: 311 and CDR-L3 as depicted in SEQ ID NO: 935,
CDR-H1 as depicted in SEQ ID NO: 142, CDR-H2 as depicted in SEQ ID NO: 143, CDR-H3 as depicted in SEQ ID NO: 918, CDR-L1 as depicted in SEQ ID NO: 310, CDR-L2 as depicted in SEQ ID NO: 311 and CDR-L3 as depicted in SEQ ID NO: 936,
CDR-H1 as depicted in SEQ ID NO: 136, CDR-H2 as depicted in SEQ ID NO: 137, CDR-H3 as depicted in SEQ ID NO: 138, CDR-L1 as depicted in SEQ ID NO: 304, CDR-L2 as depicted in SEQ ID NO: 305 and CDR-L3 as depicted in SEQ ID NO: 933,
CDR-H1 as depicted in SEQ ID NO: 136, CDR-H2 as depicted in SEQ ID NO: 137, CDR-H3 as depicted in SEQ ID NO: 917, CDR-L1 as depicted in SEQ ID NO: 304, CDR-L2 as depicted in SEQ ID NO: 305 and CDR-L3 as depicted in SEQ ID NO: 934,
CDR-H1 as depicted in SEQ ID NO: 130, CDR-H2 as depicted in SEQ ID NO: 131, CDR-H3 as depicted in SEQ ID NO: 132, CDR-L1 as depicted in SEQ ID NO: 298, CDR-L2 as depicted in SEQ ID NO: 299 and CDR-L3 as depicted in SEQ ID NO: 930,
CDR-H1 as depicted in SEQ ID NO: 130, CDR-H2 as depicted in SEQ ID NO: 131, CDR-H3 as depicted in SEQ ID NO: 916, CDR-L1 as depicted in SEQ ID NO: 298, CDR-L2 as depicted in SEQ ID NO: 299 and CDR-L3 as depicted in SEQ ID NO: 931,
CDR-H1 as depicted in SEQ ID NO: 130, CDR-H2 as depicted in SEQ ID NO: 131, CDR-H3 as depicted in SEQ ID NO: 916, CDR-L1 as depicted in SEQ ID NO: 298, CDR-L2 as depicted in SEQ ID NO: 299 and CDR-L3 as depicted in SEQ ID NO: 932,
CDR-H1 as depicted in SEQ ID NO: 1009, CDR-H2 as depicted in SEQ ID NO: 1010, CDR-H3 as depicted in SEQ ID NO: 1011, CDR-L1 as depicted in SEQ ID NO: 1012, CDR-L2 as depicted in SEQ ID NO: 1013 and CDR-L3 as depicted in SEQ ID NO: 1014,
CDR-H1 as depicted in SEQ ID NO: 1022, CDR-H2 as depicted in SEQ ID NO: 1023, CDR-H3 as depicted in SEQ ID NO: 1024, CDR-L1 as depicted in SEQ ID NO: 1025, CDR-L2 as depicted in SEQ ID NO: 1026 and CDR-L3 as depicted in SEQ ID NO: 1027,
CDR-H1 as depicted in SEQ ID NO: 1035, CDR-H2 as depicted in SEQ ID NO: 1036, CDR-H3 as depicted in SEQ ID NO: 1037, CDR-L1 as depicted in SEQ ID NO: 1038, CDR-L2 as depicted in SEQ ID NO: 1039 and CDR-L3 as depicted in SEQ ID NO: 1040,
CDR-H1 as depicted in SEQ ID NO: 1074, CDR-H2 as depicted in SEQ ID NO: 1075, CDR-H3 as depicted in SEQ ID NO: 1076, CDR-L1 as depicted in SEQ ID NO: 1077, CDR-L2 as depicted in SEQ ID NO: 1078 and CDR-L3 as depicted in SEQ ID NO: 1079,
CDR-H1 as depicted in SEQ ID NO: 1100, CDR-H2 as depicted in SEQ ID NO: 1101, CDR-H3 as depicted in SEQ ID NO: 1102, CDR-L1 as depicted in SEQ ID NO: 1103, CDR-L2 as depicted in SEQ ID NO: 1104 and CDR-L3 as depicted in SEQ ID NO: 1105,
CDR-H1 as depicted in SEQ ID NO: 1113, CDR-H2 as depicted in SEQ ID NO: 1114, CDR-H3 as depicted in SEQ ID NO: 1115, CDR-L1 as depicted in SEQ ID NO: 1116, CDR-L2 as depicted in SEQ ID NO: 1117 and CDR-L3 as depicted in SEQ ID NO: 1118,
CDR-H1 as depicted in SEQ ID NO: 1243, CDR-H2 as depicted in SEQ ID NO: 1244, CDR-H3 as depicted in SEQ ID NO: 1245, CDR-L1 as depicted in SEQ ID NO: 1246, CDR-L2 as depicted in SEQ ID NO: 1247 and CDR-L3 as depicted in SEQ ID NO: 1248,
CDR-H1 as depicted in SEQ ID NO: 1256, CDR-H2 as depicted in SEQ ID NO: 1257, CDR-H3 as depicted in SEQ ID NO: 1258, CDR-L1 as depicted in SEQ ID NO: 1259, CDR-L2 as depicted in SEQ ID NO: 1260 and CDR-L3 as depicted in SEQ ID NO: 1261,
CDR-H1 as depicted in SEQ ID NO: 1269, CDR-H2 as depicted in SEQ ID NO: 1270, CDR-H3 as depicted in SEQ ID NO: 1271, CDR-L1 as depicted in SEQ ID NO: 1272, CDR-L2 as depicted in SEQ ID NO: 1273 and CDR-L3 as depicted in SEQ ID NO: 1274,
CDR-H1 as depicted in SEQ ID NO: 1282, CDR-H2 as depicted in SEQ ID NO: 1283, CDR-H3 as depicted in SEQ ID NO: 1284, CDR-L1 as depicted in SEQ ID NO: 1285, CDR-L2 as depicted in SEQ ID NO: 1286 and CDR-L3 as depicted in SEQ ID NO: 1287, and
CDR-H1 as depicted in SEQ ID NO: 1295, CDR-H2 as depicted in SEQ ID NO: 1296, CDR-H3 as depicted in SEQ ID NO: 1297, CDR-L1 as depicted in SEQ ID NO: 1298, CDR-L2 as depicted in SEQ ID NO: 1299 and CDR-L3 as depicted in SEQ ID NO: 1300;
(c) CDR-H1 as depicted in SEQ ID NO: 94, CDR-H2 as depicted in SEQ ID NO: 95, CDR-H3 as depicted in SEQ ID NO: 96, CDR-L1 as depicted in SEQ ID NO: 262, CDR-L2 as depicted in SEQ ID NO: 263 and CDR-L3 as depicted in SEQ ID NO: 264,
CDR-H1 as depicted in SEQ ID NO: 100, CDR-H2 as depicted in SEQ ID NO: 101, CDR-H3 as depicted in SEQ ID NO: 102, CDR-L1 as depicted in SEQ ID NO: 268, CDR-L2 as depicted in SEQ ID NO: 269 and CDR-L3 as depicted in SEQ ID NO: 270,
CDR-H1 as depicted in SEQ ID NO: 118, CDR-H2 as depicted in SEQ ID NO: 119, CDR-H3 as depicted in SEQ ID NO: 120, CDR-L1 as depicted in SEQ ID NO: 286, CDR-L2 as depicted in SEQ ID NO: 287 and CDR-L3 as depicted in SEQ ID NO: 288,
CDR-H1 as depicted in SEQ ID NO: 154, CDR-H2 as depicted in SEQ ID NO: 155, CDR-H3 as depicted in SEQ ID NO: 156, CDR-L1 as depicted in SEQ ID NO: 322, CDR-L2 as depicted in SEQ ID NO: 323 and CDR-L3 as depicted in SEQ ID NO: 324,
CDR-H1 as depicted in SEQ ID NO: 100, CDR-H2 as depicted in SEQ ID NO: 101, CDR-H3 as depicted in SEQ ID NO: 912, CDR-L1 as depicted in SEQ ID NO: 268, CDR-L2 as depicted in SEQ ID NO: 269 and CDR-L3 as depicted in SEQ ID NO: 270,
CDR-H1 as depicted in SEQ ID NO: 100, CDR-H2 as depicted in SEQ ID NO: 101, CDR-H3 as depicted in SEQ ID NO: 913, CDR-L1 as depicted in SEQ ID NO: 268, CDR-L2 as depicted in SEQ ID NO: 269 and CDR-L3 as depicted in SEQ ID NO: 270,
CDR-H1 as depicted in SEQ ID NO: 94, CDR-H2 as depicted in SEQ ID NO: 95, CDR-H3 as depicted in SEQ ID NO: 910, CDR-L1 as depicted in SEQ ID NO: 262, CDR-L2 as depicted in SEQ ID NO: 263 and CDR-L3 as depicted in SEQ ID NO: 264,
CDR-H1 as depicted in SEQ ID NO: 94, CDR-H2 as depicted in SEQ ID NO: 95, CDR-H3 as depicted in SEQ ID NO: 911, CDR-L1 as depicted in SEQ ID NO: 262, CDR-L2 as depicted in SEQ ID NO: 263 and CDR-L3 as depicted in SEQ ID NO: 264,
CDR-H1 as depicted in SEQ ID NO: 118, CDR-H2 as depicted in SEQ ID NO: 119, CDR-H3 as depicted in SEQ ID NO: 120, CDR-L1 as depicted in SEQ ID NO: 286, CDR-L2 as depicted in SEQ ID NO: 287 and CDR-L3 as depicted in SEQ ID NO: 288,
CDR-H1 as depicted in SEQ ID NO: 118, CDR-H2 as depicted in SEQ ID NO: 914, CDR-H3 as depicted in SEQ ID NO: 120, CDR-L1 as depicted in SEQ ID NO: 286, CDR-L2 as depicted in SEQ ID NO: 287 and CDR-L3 as depicted in SEQ ID NO: 288,
CDR-H1 as depicted in SEQ ID NO: 154, CDR-H2 as depicted in SEQ ID NO: 155, CDR-H3 as depicted in SEQ ID NO: 920, CDR-L1 as depicted in SEQ ID NO: 322, CDR-L2 as depicted in SEQ ID NO: 323 and CDR-L3 as depicted in SEQ ID NO: 324,
CDR-H1 as depicted in SEQ ID NO: 996, CDR-H2 as depicted in SEQ ID NO: 997, CDR-H3 as depicted in SEQ ID NO: 998, CDR-L1 as depicted in SEQ ID NO: 999, CDR-L2 as depicted in SEQ ID NO: 1000 and CDR-L3 as depicted in SEQ ID NO: 1001,
CDR-H1 as depicted in SEQ ID NO: 1048, CDR-H2 as depicted in SEQ ID NO: 1049, CDR-H3 as depicted in SEQ ID NO: 1050, CDR-L1 as depicted in SEQ ID NO: 1051, CDR-L2 as depicted in SEQ ID NO: 1052 and CDR-L3 as depicted in SEQ ID NO: 1053, and
CDR-H1 as depicted in SEQ ID NO: 1087, CDR-H2 as depicted in SEQ ID NO: 1088, CDR-H3 as depicted in SEQ ID NO: 1089, CDR-L1 as depicted in SEQ ID NO: 1090, CDR-L2 as depicted in SEQ ID NO: 1091 and CDR-L3 as depicted in SEQ ID NO: 1092;
(d) CDR-H1 as depicted in SEQ ID NO: 4, CDR-H2 as depicted in SEQ ID NO: 5, CDR-H3 as depicted in SEQ ID NO: 6, CDR-L1 as depicted in SEQ ID NO: 172, CDR-L2 as depicted in SEQ ID NO: 173 and CDR-L3 as depicted in SEQ ID NO: 174,
CDR-H1 as depicted in SEQ ID NO: 10, CDR-H2 as depicted in SEQ ID NO: 11, CDR-H3 as depicted in SEQ ID NO: 12, CDR-L1 as depicted in SEQ ID NO: 178, CDR-L2 as depicted in SEQ ID NO: 179 and CDR-L3 as depicted in SEQ ID NO: 180,
CDR-H1 as depicted in SEQ ID NO: 28, CDR-H2 as depicted in SEQ ID NO: 29, CDR-H3 as depicted in SEQ ID NO: 30, CDR-L1 as depicted in SEQ ID NO: 196, CDR-L2 as depicted in SEQ ID NO: 197 and CDR-L3 as depicted in SEQ ID NO: 198,
CDR-H1 as depicted in SEQ ID NO: 34, CDR-H2 as depicted in SEQ ID NO: 35, CDR-H3 as depicted in SEQ ID NO: 36, CDR-L1 as depicted in SEQ ID NO: 202, CDR-L2 as depicted in SEQ ID NO: 203 and CDR-L3 as depicted in SEQ ID NO: 204,
CDR-H1 as depicted in SEQ ID NO: 46, CDR-H2 as depicted in SEQ ID NO: 47, CDR-H3 as depicted in SEQ ID NO: 48, CDR-L1 as depicted in SEQ ID NO: 214, CDR-L2 as depicted in SEQ ID NO: 215 and CDR-L3 as depicted in SEQ ID NO: 216,
CDR-H1 as depicted in SEQ ID NO: 58, CDR-H2 as depicted in SEQ ID NO: 59, CDR-H3 as depicted in SEQ ID NO: 60, CDR-L1 as depicted in SEQ ID NO: 226, CDR-L2 as depicted in SEQ ID NO: 227 and CDR-L3 as depicted in SEQ ID NO: 228,
CDR-H1 as depicted in SEQ ID NO: 64, CDR-H2 as depicted in SEQ ID NO: 65, CDR-H3 as depicted in SEQ ID NO: 66, CDR-L1 as depicted in SEQ ID NO: 232, CDR-L2 as depicted in SEQ ID NO: 233 and CDR-L3 as depicted in SEQ ID NO: 234,
CDR-H1 as depicted in SEQ ID NO: 70, CDR-H2 as depicted in SEQ ID NO: 71, CDR-H3 as depicted in SEQ ID NO: 72, CDR-L1 as depicted in SEQ ID NO: 238, CDR-L2 as depicted in SEQ ID NO: 239 and CDR-L3 as depicted in SEQ ID NO: 240,
CDR-H1 as depicted in SEQ ID NO: 160, CDR-H2 as depicted in SEQ ID NO: 161, CDR-H3 as depicted in SEQ ID NO: 162, CDR-L1 as depicted in SEQ ID NO: 328, CDR-L2 as depicted in SEQ ID NO: 329 and CDR-L3 as depicted in SEQ ID NO: 330,
CDR-H1 as depicted in SEQ ID NO: 46, CDR-H2 as depicted in SEQ ID NO: 47, CDR-H3 as depicted in SEQ ID NO: 48, CDR-L1 as depicted in SEQ ID NO: 924, CDR-L2 as depicted in SEQ ID NO: 215 and CDR-L3 as depicted in SEQ ID NO: 216,
CDR-H1 as depicted in SEQ ID NO: 46, CDR-H2 as depicted in SEQ ID NO: 47, CDR-H3 as depicted in SEQ ID NO: 902, CDR-L1 as depicted in SEQ ID NO: 924, CDR-L2 as depicted in SEQ ID NO: 215 and CDR-L3 as depicted in SEQ ID NO: 216,
CDR-H1 as depicted in SEQ ID NO: 46, CDR-H2 as depicted in SEQ ID NO: 47, CDR-H3 as depicted in SEQ ID NO: 903, CDR-L1 as depicted in SEQ ID NO: 924, CDR-L2 as depicted in SEQ ID NO: 215 and CDR-L3 as depicted in SEQ ID NO: 216,
CDR-H1 as depicted in SEQ ID NO: 46, CDR-H2 as depicted in SEQ ID NO: 47, CDR-H3 as depicted in SEQ ID NO: 48, CDR-L1 as depicted in SEQ ID NO: 925, CDR-L2 as depicted in SEQ ID NO: 215 and CDR-L3 as depicted in SEQ ID NO: 216,
CDR-H1 as depicted in SEQ ID NO: 70, CDR-H2 as depicted in SEQ ID NO: 907, CDR-H3 as depicted in SEQ ID NO: 72, CDR-L1 as depicted in SEQ ID NO: 238, CDR-L2 as depicted in SEQ ID NO: 239 and CDR-L3 as depicted in SEQ ID NO: 240,
CDR-H1 as depicted in SEQ ID NO: 70, CDR-H2 as depicted in SEQ ID NO: 907, CDR-H3 as depicted in SEQ ID NO: 908, CDR-L1 as depicted in SEQ ID NO: 238, CDR-L2 as depicted in SEQ ID NO: 239 and CDR-L3 as depicted in SEQ ID NO: 240,
CDR-H1 as depicted in SEQ ID NO: 28, CDR-H2 as depicted in SEQ ID NO: 901, CDR-H3 as depicted in SEQ ID NO: 30, CDR-L1 as depicted in SEQ ID NO: 922, CDR-L2 as depicted in SEQ ID NO: 197 and CDR-L3 as depicted in SEQ ID NO: 923,
CDR-H1 as depicted in SEQ ID NO: 58, CDR-H2 as depicted in SEQ ID NO: 905, CDR-H3 as depicted in SEQ ID NO: 906, CDR-L1 as depicted in SEQ ID NO: 226, CDR-L2 as depicted in SEQ ID NO: 227 and CDR-L3 as depicted in SEQ ID NO: 228,
CDR-H1 as depicted in SEQ ID NO: 58, CDR-H2 as depicted in SEQ ID NO: 905, CDR-H3 as depicted in SEQ ID NO: 60, CDR-L1 as depicted in SEQ ID NO: 226, CDR-L2 as depicted in SEQ ID NO: 227 and CDR-L3 as depicted in SEQ ID NO: 228,
CDR-H1 as depicted in SEQ ID NO: 160, CDR-H2 as depicted in SEQ ID NO: 161, CDR-H3 as depicted in SEQ ID NO: 162, CDR-L1 as depicted in SEQ ID NO: 939, CDR-L2 as depicted in SEQ ID NO: 329 and CDR-L3 as depicted in SEQ ID NO: 330,
CDR-H1 as depicted in SEQ ID NO: 160, CDR-H2 as depicted in SEQ ID NO: 921, CDR-H3 as depicted in SEQ ID NO: 162, CDR-L1 as depicted in SEQ ID NO: 939, CDR-L2 as depicted in SEQ ID NO: 329 and CDR-L3 as depicted in SEQ ID NO: 940,
CDR-H1 as depicted in SEQ ID NO: 160, CDR-H2 as depicted in SEQ ID NO: 161, CDR-H3 as depicted in SEQ ID NO: 162, CDR-L1 as depicted in SEQ ID NO: 941, CDR-L2 as depicted in SEQ ID NO: 329 and CDR-L3 as depicted in SEQ ID NO: 330,
CDR-H1 as depicted in SEQ ID NO: 28, CDR-H2 as depicted in SEQ ID NO: 29, CDR-H3 as depicted in SEQ ID NO: 30, CDR-L1 as depicted in SEQ ID NO: 196, CDR-L2 as depicted in SEQ ID NO: 197 and CDR-L3 as depicted in SEQ ID NO: 923,
CDR-H1 as depicted in SEQ ID NO: 28, CDR-H2 as depicted in SEQ ID NO: 29, CDR-H3 as depicted in SEQ ID NO: 30, CDR-L1 as depicted in SEQ ID NO: 922, CDR-L2 as depicted in SEQ ID NO: 197 and CDR-L3 as depicted in SEQ ID NO: 923,
CDR-H1 as depicted in SEQ ID NO: 28, CDR-H2 as depicted in SEQ ID NO: 901, CDR-H3 as depicted in SEQ ID NO: 30, CDR-L1 as depicted in SEQ ID NO: 922, CDR-L2 as depicted in SEQ ID NO: 197 and CDR-L3 as depicted in SEQ ID NO: 923,
CDR-H1 as depicted in SEQ ID NO: 28, CDR-H2 as depicted in SEQ ID NO: 29, CDR-H3 as depicted in SEQ ID NO: 30, CDR-L1 as depicted in SEQ ID NO: 939, CDR-L2 as depicted in SEQ ID NO: 329 and CDR-L3 as depicted in SEQ ID NO: 330,
CDR-H1 as depicted in SEQ ID NO: 970, CDR-H2 as depicted in SEQ ID NO: 971, CDR-H3 as depicted in SEQ ID NO: 972, CDR-L1 as depicted in SEQ ID NO: 973, CDR-L2 as depicted in SEQ ID NO: 974 and CDR-L3 as depicted in SEQ ID NO: 975,
CDR-H1 as depicted in SEQ ID NO: 1061, CDR-H2 as depicted in SEQ ID NO: 1062, CDR-H3 as depicted in SEQ ID NO: 1063, CDR-L1 as depicted in SEQ ID NO: 1064, CDR-L2 as depicted in SEQ ID NO: 1065 and CDR-L3 as depicted in SEQ ID NO: 1066,
CDR-H1 as depicted in SEQ ID NO: 1139, CDR-H2 as depicted in SEQ ID NO: 1140, CDR-H3 as depicted in SEQ ID NO: 1141, CDR-L1 as depicted in SEQ ID NO: 1142, CDR-L2 as depicted in SEQ ID NO: 1143 and CDR-L3 as depicted in SEQ ID NO: 1144,
CDR-H1 as depicted in SEQ ID NO: 1152, CDR-H2 as depicted in SEQ ID NO: 1153, CDR-H3 as depicted in SEQ ID NO: 1154, CDR-L1 as depicted in SEQ ID NO: 1155, CDR-L2 as depicted in SEQ ID NO: 1156 and CDR-L3 as depicted in SEQ ID NO: 1157,
CDR-H1 as depicted in SEQ ID NO: 1178, CDR-H2 as depicted in SEQ ID NO: 1179, CDR-H3 as depicted in SEQ ID NO: 1180, CDR-L1 as depicted in SEQ ID NO: 1181, CDR-L2 as depicted in SEQ ID NO: 1182 and CDR-L3 as depicted in SEQ ID NO: 1183,
CDR-H1 as depicted in SEQ ID NO: 1191, CDR-H2 as depicted in SEQ ID NO: 1192, CDR-H3 as depicted in SEQ ID NO: 1193, CDR-L1 as depicted in SEQ ID NO: 1194, CDR-L2 as depicted in SEQ ID NO: 1195 and CDR-L3 as depicted in SEQ ID NO: 1196,
CDR-H1 as depicted in SEQ ID NO: 1204, CDR-H2 as depicted in SEQ ID NO: 1205, CDR-H3 as depicted in SEQ ID NO: 1206, CDR-L1 as depicted in SEQ ID NO: 1207, CDR-L2 as depicted in SEQ ID NO: 1208 and CDR-L3 as depicted in SEQ ID NO: 1209,
CDR-H1 as depicted in SEQ ID NO: 1217, CDR-H2 as depicted in SEQ ID NO: 1218, CDR-H3 as depicted in SEQ ID NO: 1219, CDR-L1 as depicted in SEQ ID NO: 1220, CDR-L2 as depicted in SEQ ID NO: 1221 and CDR-L3 as depicted in SEQ ID NO: 1222,
CDR-H1 as depicted in SEQ ID NO: 1230, CDR-H2 as depicted in SEQ ID NO: 1231, CDR-H3 as depicted in SEQ ID NO: 1232, CDR-L1 as depicted in SEQ ID NO: 1233, CDR-L2 as depicted in SEQ ID NO: 1234 and CDR-L3 as depicted in SEQ ID NO: 1235,
CDR-H1 as depicted in SEQ ID NO: 1308, CDR-H2 as depicted in SEQ ID NO: 1309, CDR-H3 as depicted in SEQ ID NO: 1310, CDR-L1 as depicted in SEQ ID NO: 1311, CDR-L2 as depicted in SEQ ID NO: 1312 and CDR-L3 as depicted in SEQ ID NO: 1313,
CDR-H1 as depicted in SEQ ID NO: 1321, CDR-H2 as depicted in SEQ ID NO: 1322, CDR-H3 as depicted in SEQ ID NO: 1323, CDR-L1 as depicted in SEQ ID NO: 1324, CDR-L2 as depicted in SEQ ID NO: 1325 and CDR-L3 as depicted in SEQ ID NO: 1326,
CDR-H1 as depicted in SEQ ID NO: 1373, CDR-H2 as depicted in SEQ ID NO: 1374, CDR-H3 as depicted in SEQ ID NO: 1375, CDR-L1 as depicted in SEQ ID NO: 1376, CDR-L2 as depicted in SEQ ID NO: 1377 and CDR-L3 as depicted in SEQ ID NO: 1378,
CDR-H1 as depicted in SEQ ID NO: 1386, CDR-H2 as depicted in SEQ ID NO: 1387, CDR-H3 as depicted in SEQ ID NO: 1388, CDR-L1 as depicted in SEQ ID NO: 1389, CDR-L2 as depicted in SEQ ID NO: 1390 and CDR-L3 as depicted in SEQ ID NO: 1391,
CDR-H1 as depicted in SEQ ID NO: 1399, CDR-H2 as depicted in SEQ ID NO: 1400, CDR-H3 as depicted in SEQ ID NO: 1401, CDR-L1 as depicted in SEQ ID NO: 1402, CDR-L2 as depicted in SEQ ID NO: 1403 and CDR-L3 as depicted in SEQ ID NO: 1404,
CDR-H1 as depicted in SEQ ID NO: 1412, CDR-H2 as depicted in SEQ ID NO: 1413, CDR-H3 as depicted in SEQ ID NO: 1414, CDR-L1 as depicted in SEQ ID NO: 1415, CDR-L2 as depicted in SEQ ID NO: 1416 and CDR-L3 as depicted in SEQ ID NO: 1417; and
(e) CDR-H1 as depicted in SEQ ID NO: 76, CDR-H2 as depicted in SEQ ID NO: 77, CDR-H3 as depicted in SEQ ID NO: 78, CDR-L1 as depicted in SEQ ID NO: 244, CDR-L2 as depicted in SEQ ID NO: 245 and CDR-L3 as depicted in SEQ ID NO: 246,
CDR-H1 as depicted in SEQ ID NO: 88, CDR-H2 as depicted in SEQ ID NO: 89, CDR-H3 as depicted in SEQ ID NO: 90, CDR-L1 as depicted in SEQ ID NO: 256, CDR-L2 as depicted in SEQ ID NO: 257 and CDR-L3 as depicted in SEQ ID NO: 258,
CDR-H1 as depicted in SEQ ID NO: 106, CDR-H2 as depicted in SEQ ID NO: 107, CDR-H3 as depicted in SEQ ID NO: 108, CDR-L1 as depicted in SEQ ID NO: 274, CDR-L2 as depicted in SEQ ID NO: 275 and CDR-L3 as depicted in SEQ ID NO: 276,
CDR-H1 as depicted in SEQ ID NO: 112, CDR-H2 as depicted in SEQ ID NO: 113, CDR-H3 as depicted in SEQ ID NO: 114, CDR-L1 as depicted in SEQ ID NO: 280, CDR-L2 as depicted in SEQ ID NO: 281 and CDR-L3 as depicted in SEQ ID NO: 282,
CDR-H1 as depicted in SEQ ID NO: 106, CDR-H2 as depicted in SEQ ID NO: 107, CDR-H3 as depicted in SEQ ID NO: 108, CDR-L1 as depicted in SEQ ID NO: 274, CDR-L2 as depicted in SEQ ID NO: 275 and CDR-L3 as depicted in SEQ ID NO: 276, and
CDR-H1 as depicted in SEQ ID NO: 983, CDR-H2 as depicted in SEQ ID NO: 984, CDR-H3 as depicted in SEQ ID NO: 985, CDR-L1 as depicted in SEQ ID NO: 986, CDR-L2 as depicted in SEQ ID NO: 987 and CDR-L3 as depicted in SEQ ID NO: 988.

3. The antibody construct according to claim 1 or 2, wherein the first binding domain comprises a VH region selected from the group consisting of VH regions
(a) as depicted in SEQ ID NO: 362, SEQ ID NO: 364, SEQ ID NO: 485, SEQ ID NO: 486, SEQ ID NO: 487, SEQ ID NO: 492, SEQ ID NO: 493, SEQ ID NO: 494, SEQ ID NO: 495, SEQ ID NO: 1133, SEQ ID NO: 1172, SEQ ID NO: 1341, SEQ ID NO: 1354, SEQ ID NO: 1367, SEQ ID NO: 1432, and SEQ ID NO: 1445;
(b) as depicted in SEQ ID NO: 342, SEQ ID NO: 366, SEQ ID NO: 370, SEQ ID NO: 344, SEQ ID NO: 372, SEQ ID NO: 368, SEQ ID NO: 496, SEQ ID NO: 497, SEQ ID NO: 498, SEQ ID NO: 499, SEQ ID NO: 500, SEQ ID NO: 508, SEQ ID NO: 509, SEQ ID NO: 510, SEQ ID NO: 511, SEQ ID NO: 512, SEQ ID NO: 519, SEQ ID NO: 520, SEQ ID NO: 521, SEQ ID NO: 522, SEQ ID NO: 523, SEQ ID NO: 524, SEQ ID NO: 525, SEQ ID NO: 526, SEQ ID NO: 527, SEQ ID NO: 528, SEQ ID NO: 529, SEQ ID NO: 530, SEQ ID NO: 531, SEQ ID NO: 532, SEQ ID NO: 533, SEQ ID NO: 534, SEQ ID NO: 535, SEQ ID NO: 536, SEQ ID NO: 537, SEQ ID NO: 538, SEQ ID NO: 1016, SEQ ID NO: 1029, SEQ ID NO: 1042, SEQ ID NO: 1081, SEQ ID NO: 1107, SEQ ID NO: 1120, SEQ ID NO: 1250, SEQ ID NO: 1263, SEQ ID NO: 1276, SEQ ID NO: 1289, and SEQ ID NO: 1302;
(c) as depicted in SEQ ID NO: 338, SEQ ID NO: 354, SEQ ID NO: 378, SEQ ID NO: 356, SEQ ID NO: 476, SEQ ID NO: 477, SEQ ID NO: 478, SEQ ID NO: 479, SEQ ID NO: 480, SEQ ID NO: 481, SEQ ID NO: 482, SEQ ID NO: 483, SEQ ID NO: 484, SEQ ID NO: 501, SEQ ID NO: 502, SEQ ID NO: 503, SEQ ID NO: 504, SEQ ID NO: 505, SEQ ID NO: 506, SEQ ID NO: 517, SEQ ID NO: 518, SEQ ID NO: 1003, SEQ ID NO: 1055, and SEQ ID NO: 1094;
(d) as depicted in SEQ ID NO: 352, SEQ ID NO: 360, SEQ ID NO: 388, SEQ ID NO: 386, SEQ ID NO: 340, SEQ ID NO: 346, SEQ ID NO: 374, SEQ ID NO: 348, SEQ ID NO: 390, SEQ ID NO: 463, SEQ ID NO: 464, SEQ ID NO: 465, SEQ ID NO: 466, SEQ ID NO: 467, SEQ ID NO: 468, SEQ ID NO: 469, SEQ ID NO: 470, SEQ ID NO: 471, SEQ ID NO: 472, SEQ ID NO: 473, SEQ ID NO: 474, SEQ ID NO: 475, SEQ ID NO: 488, SEQ ID NO: 489, SEQ ID NO: 490, SEQ ID NO: 491, SEQ ID NO: 513, SEQ ID NO: 514, SEQ ID NO: 515, SEQ ID NO: 516, SEQ ID NO: 540, SEQ ID NO: 541, SEQ ID NO: 542, SEQ ID NO: 543, SEQ ID NO: 977, SEQ ID NO: 1068, SEQ ID NO: 1146, SEQ ID NO: 1159, SEQ ID NO: 1185, SEQ ID NO: 1198, SEQ ID NO: 1211, SEQ ID NO: 1224, SEQ ID NO: 1237, SEQ ID NO: 1315, SEQ ID NO: 1328, SEQ ID NO: 1380, SEQ ID NO: 1393, SEQ ID NO: 1406, and SEQ ID NO: 1419; and
(e) as depicted in SEQ ID NO: 376, SEQ ID NO: 392, SEQ ID NO: 358, SEQ ID NO: 350, SEQ ID NO: 507, and SEQ ID NO: 990.

4. The antibody construct according to any one of the preceding claims, wherein the first binding domain comprises a VL region selected from the group consisting of VL regions
(a) as depicted in SEQ ID NO: 418, SEQ ID NO: 420, SEQ ID NO: 580, SEQ ID NO: 581, SEQ ID NO: 582, SEQ ID NO: 587, SEQ ID NO: 588, SEQ ID NO: 589, SEQ ID NO: 590, SEQ ID NO: 1135, SEQ ID NO: 1174, SEQ ID NO: 1343, SEQ ID NO: 1356, SEQ ID NO: 1369, SEQ ID NO: 1434, and SEQ ID NO: 1447;
(b) as depicted in SEQ ID NO: 398, SEQ ID NO: 422, SEQ ID NO: 426, SEQ ID NO: 400, SEQ ID NO: 428, SEQ ID NO: 424, SEQ ID NO: 591, SEQ ID NO: 592, SEQ ID NO: 593, SEQ ID NO: 594, SEQ ID NO: 595, SEQ ID NO: 603, SEQ ID NO: 604, SEQ ID NO: 605, SEQ ID NO: 606, SEQ ID NO: 607, SEQ ID NO: 614, SEQ ID NO: 615, SEQ ID NO: 616, SEQ ID NO: 617, SEQ ID NO: 618, SEQ ID NO: 619, SEQ ID NO: 620, SEQ ID NO: 621, SEQ ID NO: 622, SEQ ID NO: 623, SEQ ID NO: 624, SEQ ID NO: 625, SEQ ID NO: 626, SEQ ID NO: 627, SEQ ID NO: 628, SEQ ID NO: 629, SEQ ID NO: 630, SEQ ID NO: 631, SEQ ID NO: 632, SEQ ID NO: 633, SEQ ID NO: 1018, SEQ ID NO: 1031, SEQ ID NO: 1044, SEQ ID NO: 1083, SEQ ID NO: 1109, SEQ ID NO: 1122, SEQ ID NO: 1252, SEQ ID NO: 1265, SEQ ID NO: 1278, SEQ ID NO: 1291, and SEQ ID NO: 1304;
(c) as depicted in SEQ ID NO: 394, SEQ ID NO: 410, SEQ ID NO: 434, SEQ ID NO: 412, SEQ ID NO: 571, SEQ ID NO: 572, SEQ ID NO: 573, SEQ ID NO: 574, SEQ ID NO: 575, SEQ ID NO: 576, SEQ ID NO: 577, SEQ ID NO: 578, SEQ ID NO: 579, SEQ ID NO: 596, SEQ ID NO: 597, SEQ ID NO: 598, SEQ ID NO: 599, SEQ ID NO: 600, SEQ ID NO: 601, SEQ ID NO: 612, SEQ ID NO: 613, SEQ ID NO: 1005, SEQ ID NO: 1057, and SEQ ID NO: 1096;
(d) as depicted in SEQ ID NO: 408, SEQ ID NO: 416, SEQ ID NO: 444, SEQ ID NO: 442, SEQ ID NO: 396, SEQ ID NO: 402, SEQ ID NO: 430, SEQ ID NO: 404, SEQ ID NO: 446, SEQ ID NO: 558, SEQ ID NO: 559, SEQ ID NO: 560, SEQ ID NO: 561, SEQ ID NO: 562, SEQ ID NO: 563, SEQ ID NO: 564, SEQ ID NO: 565, SEQ ID NO: 566, SEQ ID NO: 567, SEQ ID NO: 568, SEQ ID NO: 569, SEQ ID NO: 570, SEQ ID NO: 583, SEQ ID NO: 584, SEQ ID NO: 585, SEQ ID NO: 586, SEQ ID NO: 608, SEQ ID NO: 609, SEQ ID NO: 610, SEQ ID NO: 611, SEQ ID NO: 635, SEQ ID NO: 636, SEQ ID NO: 637, SEQ ID NO: 638, SEQ ID NO: 979, SEQ ID NO: 1070, SEQ ID NO: 1148, SEQ ID NO: 1161, SEQ ID NO: 1187, SEQ ID NO: 1200, SEQ ID NO: 1213, SEQ ID NO: 1226, SEQ ID NO: 1239, SEQ ID NO: 1317, SEQ ID NO: 1330, SEQ ID NO: 1382, SEQ ID NO: 1395, SEQ ID NO: 1408, and SEQ ID NO: 1421; and
(e) as depicted in SEQ ID NO: 432, SEQ ID NO: 448, SEQ ID NO: 414, SEQ ID NO: 406, SEQ ID NO: 602, and SEQ ID NO: 992.

5. The antibody construct according to any one of the preceding claims, wherein the first binding domain comprises a VH region and a VL region selected from the group consisting of:
(1) pairs of a VH region and a VL region as depicted in SEQ ID NOs: 362+418, SEQ ID NOs: 364+420, SEQ ID NOs: 485+580, SEQ ID NOs: 486+581, SEQ ID NOs: 487+582, SEQ ID NOs: 492+587, SEQ ID NOs: 493+588, SEQ ID NOs: 494+589, SEQ ID NOs: 495+590, SEQ ID NOs: 1133+1135, SEQ ID NOs: 1172+1174, SEQ ID NOs: 1341+1343, SEQ ID NOs: 1354+1356, SEQ ID NOs: 1367+1369, SEQ ID NOs: 1432+1434, and SEQ ID NOs: 1445+1447;
(2) pairs of a VH region and a VL region as depicted in SEQ ID NOs: 342+398, SEQ ID NOs: 366+422, SEQ ID NOs: 370+426, SEQ ID NOs: 344+400, SEQ ID NOs: 372+428, SEQ ID NOs: 368+424, SEQ ID NOs: 496+591, SEQ ID NOs: 497+592, SEQ ID NOs: 498+593, SEQ ID NOs: 499+594, SEQ ID NOs: 500+595, SEQ ID NOs: 508+603, SEQ ID NOs: 509+604, SEQ ID NOs: 510+605, SEQ ID NOs: 511+606, SEQ ID NOs: 512+607, SEQ ID NOs: 519+614, SEQ ID NOs: 520+615, SEQ ID NOs: 521+616, SEQ ID NOs: 522+617, SEQ ID NOs: 523+618, SEQ ID NOs: 524+619, SEQ ID NOs: 525+620, SEQ ID NOs: 526+621, SEQ ID NOs: 527+622, SEQ ID NOs: 528+623, SEQ ID NOs: 529+624, SEQ ID NOs: 530+625, SEQ ID NOs: 531+626, SEQ ID NOs: 532+627, SEQ ID NOs: 533+628, SEQ ID NOs: 534+629, SEQ ID NOs: 535+630, SEQ ID NOs: 536+631, SEQ ID NOs: 537+632, SEQ ID NOs: 538+633, SEQ ID NOs: 1016+1018, SEQ ID NOs: 1029+1031, SEQ ID NOs: 1042+1044, SEQ ID NOs: 1081+1083, SEQ ID NOs: 1107+1109, SEQ ID NOs: 1120+1122, SEQ ID NOs: 1250+1252, SEQ ID NOs: 1263+1265, SEQ ID NOs: 1276+1278, SEQ ID NOs: 1289+1291, and SEQ ID NOs: 1302+1304;
(3) pairs of a VH region and a VL region as depicted in SEQ ID NOs: 338+394, SEQ ID NOs: 354+410, SEQ ID NOs: 378+434, SEQ ID NOs: 356+412, SEQ ID NOs: 476+571, SEQ ID NOs: 477+572, SEQ ID NOs: 478+573, SEQ ID NOs: 479+574, SEQ ID NOs: 480+575, SEQ ID NOs: 481+576, SEQ ID NOs: 482+577, SEQ ID NOs: 483+578, SEQ ID NOs: 484+579, SEQ ID NOs: 501+596, SEQ ID NOs: 502+597, SEQ ID NOs: 503+598, SEQ ID NOs: 504+599, SEQ ID NOs: 505+600, SEQ ID NOs: 506+601, SEQ ID NOs: 517+612, SEQ ID NOs: 518+613, SEQ ID NOs: 1003+1005, SEQ ID NOs: 1055+1057, and SEQ ID NOs: 1094+1096;
(4) pairs of a VH region and a VL region as depicted in SEQ ID NOs: 352+408, SEQ ID NOs: 360+416, SEQ ID NOs: 388+444, SEQ ID NOs: 386+442, SEQ ID NOs: 340+396, SEQ ID NOs: 346+402, SEQ ID NOs: 374+430, SEQ ID NOs: 348+404, SEQ ID NOs: 390+446, SEQ ID NOs: 463+558, SEQ ID NOs: 464+559, SEQ ID NOs: 465+560, SEQ ID NOs: 466+561, SEQ ID NOs: 467+562, SEQ ID NOs: 468+563, SEQ ID NOs: 469+564, SEQ ID NOs: 470+565, SEQ ID NOs: 471+566, SEQ ID NOs: 472+567, SEQ ID NOs: 473+568, SEQ ID NOs: 474+569, SEQ ID NOs: 475+570, SEQ ID NOs: 488+583, SEQ ID NOs: 489+584, SEQ ID NOs: 490+585, SEQ ID NOs: 491+586, SEQ ID NOs: 513+608, SEQ ID NOs: 514+609, SEQ ID NOs: 515+610, SEQ ID NOs: 516+611, SEQ ID NOs: 540+635, SEQ ID NOs: 541+636, SEQ ID NOs: 542+637, SEQ ID NOs: 543+638, SEQ ID NOs: 977+979, SEQ ID NOs: 1068+1070, SEQ ID NOs: 1146+1148, SEQ ID NOs: 1159+1161, SEQ ID NOs: 1185+1187, SEQ ID NOs: 1198+1200, SEQ ID NOs: 1211+1213, SEQ ID NOs: 1224+1226, SEQ ID NOs: 1237+1239, SEQ ID NOs: 1315+1317, SEQ ID NOs: 1328+1330, SEQ ID NOs: 1380,+1382 SEQ ID NOs: 1393+1395, SEQ ID NOs: 1406+1408, and SEQ ID NOs: 1419+1421; and
(5) pairs of a VH region and a VL region as depicted in SEQ ID NOs: 376+432, SEQ ID NOs: 392+448, SEQ ID NOs: 358+414, SEQ ID NOs: 350+406, SEQ ID NOs: 507+602, and SEQ ID NOs: 990+992.

6. The antibody construct according to any one of the preceding claims, wherein the antibody construct is in a format selected from the group consisting of (scFv)₂, (single domain mAb)₂, scFv-single domain mAb, diabodies and oligomers thereof.

7. The antibody construct according to claim 6, wherein the first binding domain comprises an amino acid sequence selected from the group consisting of
(a) as depicted in SEQ ID NO: 117, SEQ ID NO: 1137, SEQ ID NO: 1176, SEQ ID NO: 1345, SEQ ID NO: 1358, SEQ ID NO: 1371, SEQ ID NO: 1436, and SEQ ID NO: 1449;
(b) as depicted in SEQ ID NO: 1020, SEQ ID NO: 1033, SEQ ID NO: 1046, SEQ ID NO: 1085, SEQ ID NO: 1111, SEQ ID NO: 1124, SEQ ID NO: 1254, SEQ ID NO: 1267, SEQ ID NO: 1280, SEQ ID NO: 1293, and SEQ ID NO: 1306;
(c) as depicted in SEQ ID NO: 1007, SEQ ID NO: 1059, and SEQ ID NO: 1098;
(d) as depicted in SEQ ID NO: 981, SEQ ID NO: 1072, SEQ ID NO: 1150, SEQ ID NO: 1163, SEQ ID NO: 1189, SEQ ID NO: 1202, SEQ ID NO: 1215, SEQ ID NO: 1228, SEQ ID NO: 1241, SEQ ID NO: 1319, SEQ ID NO: 1332, SEQ ID NO: 1384, SEQ ID NO: 1397, SEQ ID NO: 1410, and SEQ ID NO: 1423; and
(e) as depicted in SEQ ID NO: 994.

8. The antibody construct according to any one of the preceding claims, wherein the second binding domain is capable of binding to human and Callithrix jacchus, Saguinus Oedipus or Saimiri sciureus CD3 epsilon.

9. The antibody construct according claim 8, having the amino acid sequence selected from the group consisting of
(a) as depicted in SEQ ID NO: 1138, SEQ ID NO: 1177, SEQ ID NO: 1346, SEQ ID NO: 1359, SEQ ID NO: 1372, SEQ ID NO: 1437, and SEQ ID NO: 1450;
(b) as depicted in SEQ ID NO: 1021, SEQ ID NO: 1034, SEQ ID NO: 1047, SEQ ID NO: 1086, SEQ ID NO: 1112, SEQ ID NO: 1125, SEQ ID NO: 1255, SEQ ID NO: 1268, SEQ ID NO: 1281, SEQ ID NO: 1294, and SEQ ID NO: 1307;
(c) as depicted in SEQ ID NO: 1008, SEQ ID NO: 1060, and SEQ ID NO: 1099;
(d) as depicted in SEQ ID NO: 982, SEQ ID NO: 1073, SEQ ID NO: 1151, SEQ ID NO: 1164, SEQ ID NO: 1190, SEQ ID NO: 1203, SEQ ID NO: 1216, SEQ ID NO: 1229, SEQ ID NO: 1242, SEQ ID NO: 1320, SEQ ID NO: 1333, SEQ ID NO: 1385, SEQ ID NO: 1398, SEQ ID NO: 1411, and SEQ ID NO: 1424; and
(e) as depicted in SEQ ID NO: 995.

10. A nucleic acid sequence encoding an antibody construct as defined in any one of claims 1 to 9.

11. A vector comprising a nucleic acid sequence as defined in claim 10.

12. A host cell transformed or transfected with the nucleic acid sequence as defined in claim 10 or with the vector as defined in claim 11.

13. A process for the production of a antibody construct according to any one of claims 1 to 9, said process comprising culturing a host cell as defined in claim 12 under conditions allowing the expression of the antibody construct as defined in any one of claims 1 to 9 and recovering the produced antibody construct from the culture.

14. A pharmaceutical composition comprising an antibody construct according to any one of claims 1 to 9, or produced according to the process of claim 13.

15. The antibody construct according to any one of claims 1 to 9, or produced according to the process of claim 13 for use in the prevention, treatment or amelioration of a melanoma disease or metastatic melanoma disease.

16. A method for the treatment or amelioration of a melanoma disease or metastatic melanoma disease, comprising the step of administering to a subject in need thereof the antibody construct according to any one of claims 1 to 9, or produced according to the process of claim 13.

17. The method according to claim 16, wherein the melanoma disease or metastatic melanoma disease is selected from the group consisting of superficial spreading melanoma, lentigo maligna, lentigo maligna melanoma, acral lentiginous melanoma and nodular melanoma.

18. A kit comprising an antibody construct according to any one of claims 1 to 9, or produced according to the process of claim 13, a vector as defined in claim 11, and/or a host cell as defined in claim 12.
